United States Patent Application Publication US 2026/0297588 A1, published October 1, 2026 (application 19/391,782).

The application's sequence listing, which the Patent Office published only in electronic form, follows.

SEQUENCE LISTING (681 sequences)

SEQ ID NO: 1 - protein, 6 aa, synthetic construct
  VARIANT 2: note = Arg, D-Arg, Pro, D-Pro, L-Hydroxyproline, or D-Hydroxyproline
  VARIANT 5: note = Arg, D-Arg, or N omega-methyl-L-arginine
GXIDXI

SEQ ID NO: 2 - protein, 6 aa, synthetic construct
GRIDRI

SEQ ID NO: 3 - protein, 10 aa, synthetic construct
  VARIANT 2: note = Gly, D-Gly, Ala, D-Ala, Pro, D-Pro, L-Hydroxyproline, D-Hydroxyproline Ser, D-Ser, Cys, or D-Cys
  VARIANT 3: note = Phe, D-Phe, or Beta-cyclohexyl-L-alanine
  VARIANT 4: note = Gly, D-Gly, Ala, D-Ala, Ser, or D-Ser
  VARIANT 6: note = Arg, D-Arg, Pro, D-Pro, L-Hydroxyproline or D-Hydroxyproline
  VARIANT 9: note = Arg, D-Arg, or N omega-methyl-L-arginine
SXXXGXIDXI

SEQ ID NO: 4 - protein, 10 aa, synthetic construct
SCFGGRIDRI

SEQ ID NO: 5 - protein, 10 aa, synthetic construct
FGGRIDRIGA

SEQ ID NO: 6 - protein, 12 aa, synthetic construct
  VARIANT 4: note = Ser, D-Ser, Cys, or D-Cys
RSSXFGGRIDRI

SEQ ID NO: 7 - protein, 14 aa, synthetic construct
  VARIANT 4: note = Ser, D-Ser, Cys, or D-Cys
RSSXFGGRIDRIGA

SEQ ID NO: 8 - protein, 9 aa, synthetic construct
  VARIANT 1: note = Pro, D-Pro, L-Hydroxyproline, D-Hydroxyproline, Gly, D-Gly, Cys, D-Cys, Ala, or D-Ala
  SITE 2: note = Beta-cyclohexyl-L-alanine
  VARIANT 3: note = Ala, D-Ala, Ser, D-Ser, Gly, or D-Gly
  VARIANT 5: note = Pro, D-Pro, L-Hydroxyproline, Arg, or D-Arg
  VARIANT 8: note = Arg, D-Arg, or N omega-methyl-L-arginine
XXXGXIDXI

SEQ ID NO: 9 - protein, 11 aa, synthetic construct
  SITE 1: note = D-Phenylalanine
  SITE 3: note = D-Proline
  SITE 4: note = Beta-cyclohexyl-L-alanine
  SITE 5: note = D-Alanine
FSPXAGPIDRI

SEQ ID NO: 10 - protein, 28 aa, synthetic construct
  SITE 28: note = Amidated residue
  SITE 7..23: note = Intrachain disulfide bridge
SLRRSSCFGGRIDRIGAQSGLGCNSFRY

SEQ ID NO: 11 - protein, 20 aa, synthetic construct
  SITE 20: note = Amidated residue
  SITE 4..20: note = Intrachain disulfide bridge
RSSCFGGRIDRIGAQSGLGC

SEQ ID NO: 12 - protein, 20 aa, synthetic construct
  SITE 20: note = Amidated residue
RSSCFGGRIDRIGAQSGLGC

SEQ ID NO: 13 - protein, 20 aa, synthetic construct
  SITE 20: note = Amidated residue
RSSSFGGRIDRIGAQSGLGS

SEQ ID NO: 14 - protein, 20 aa, synthetic construct
  SITE 4..20: note = Intrachain disulfide bridge
RSSCFGGRIDRIGAQSGLGC

SEQ ID NO: 15 - protein, 20 aa, synthetic construct
RSSCFGGRIDRIGAQSGLGC

SEQ ID NO: 16 - protein, 20 aa, synthetic construct
RSSSFGGRIDRIGAQSGLGS

SEQ ID NO: 17 - protein, 20 aa, synthetic construct
  SITE 20: note = Amidated residue
RSSSFGGRIDRIGAQSGLGS

SEQ ID NO: 18 - protein, 15 aa, synthetic construct
  SITE 15: note = Amidated residue
  SITE 4..15: note = Intrachain disulfide bridge
RSSCFGGRIDRIGAC

SEQ ID NO: 19 - protein, 20 aa, synthetic construct
  SITE 4..20: note = Methylene thioacetal (Cys-S-CH2-S-Cys) linkage
RSSCFGGRIDRIGAQSGLGC

SEQ ID NO: 20 - protein, 20 aa, synthetic construct
  SITE 20: note = Amidated residue
  SITE 4..20: note = Methylene thioacetal (Cys-S-CH2-S-Cys) linkage
RSSCFGGRIDRIGAQSGLGC

SEQ ID NO: 21 - protein, 11 aa, synthetic construct
  SITE 1: note = D-Phenylalanine
  SITE 3: note = D-Proline
  SITE 4: note = Beta-cyclohexyl-L-alanine
  SITE 5: note = D-Alanine
  SITE 11: note = Amidated residue
FSPXAGPIDRI

SEQ ID NO: 22 - protein, 11 aa, synthetic construct
  SITE 1: note = D-Phenylalanine
  SITE 3: note = D-Hydroxyproline
  SITE 4: note = Beta-cyclohexyl-L-alanine
  SITE 5: note = D-Serine
  SITE 7: note = L-Hydroxyproline
  SITE 10: note = N omega-methyl-L-arginine
  SITE 11: note = Methylamine modified residue
FSXXSGXIDRI

SEQ ID NO: 23 - protein, 22 aa, synthetic construct
  SITE 1: note = D-Phenylalanine
  SITE 3: note = D-Proline
  SITE 4: note = Beta-cyclohexyl-L-alanine
  SITE 5: note = D-Alanine
  SITE 22: note = Amidated residue
FSPXAGPIDRIGSPSSGAPPPS

SEQ ID NO: 24 - protein, 11 aa, synthetic construct
  SITE 1: note = D-Phenylalanine
  SITE 3: note = D-Proline
  SITE 4: note = Beta-cyclohexyl-L-alanine
  SITE 5: note = D-Alanine
FSPXAGPIDRI

SEQ ID NO: 25 - protein, 12 aa, synthetic construct
  SITE 1: note = L-Ornithine
  SITE 2: note = D-Phenylalanine
  SITE 4: note = D-Proline
  SITE 5: note = Beta-cyclohexyl-L-alanine
  SITE 6: note = D-Alanine
  SITE 12: note = Amidated residue
XFSPXAGPIDSI

SEQ ID NO: 26 - protein, 12 aa, synthetic construct
  SITE 1: note = D-Phenylalanine
  SITE 3: note = D-Proline
  SITE 4: note = Beta-cyclohexyl-L-alanine
  SITE 5: note = D-Alanine
  SITE 12: note = Amidated L-2,3-Diaminopropionic Acid
FSPXAGPIDSIX

SEQ ID NO: 27 - protein, 11 aa, synthetic construct
  SITE 1: note = D-Phenylalanine
  SITE 3: note = D-Pipecolic Acid (D-Homoproline)
  SITE 4: note = Beta-cyclohexyl-L-alanine
  SITE 5: note = D-Alanine
  SITE 11: note = Amidated residue
FSXXAGPIDSI

SEQ ID NO: 28 - protein, 11 aa, synthetic construct
  SITE 4: note = Beta-cyclohexyl-L-alanine
  SITE 11: note = Amidated residue
FSGXGGRIDRI

SEQ ID NO: 29 - protein, 11 aa, synthetic construct
  SITE 4: note = Beta-cyclohexyl-L-alanine
  SITE 5: note = 2-Aminoisobutyric Acid
  SITE 11: note = Amidated residue
FSGXXGRIDRI

SEQ ID NO: 30 - protein, 11 aa, synthetic construct
  SITE 1: note = D-Phenylalanine
  SITE 3: note = D-Proline
  SITE 4: note = Beta-cyclohexyl-L-alanine
  SITE 5: note = D-Alanine
  SITE 11: note = Amidated residue
FSPXAGPIERI

SEQ ID NO: 31 - protein, 11 aa, synthetic construct
  SITE 1: note = D-Phenylalanine
  SITE 3: note = D-Proline
  SITE 4: note = Beta-cyclohexyl-L-alanine
  SITE 5: note = D-Alanine
  SITE 10: note = N-Methyl-L-arginine
  SITE 11: note = Amidated residue
FSPXAGPIDRI

SEQ ID NO: 32 - protein, 13 aa, synthetic construct
  SITE 13: note = Amidated residue
RSFSGFGGRIDRI

SEQ ID NO: 33 - protein, 21 aa, synthetic construct
  SITE 21: note = Amidated residue
RSFSGFGGRIDRIGAQSGLGS

SEQ ID NO: 34 - protein, 14 aa, synthetic construct
  SITE 14: note = Amidated residue
RSFSGFGGRIDRIG

SEQ ID NO: 35 - protein, 10 aa, synthetic construct
  SITE 2: note = Beta-cyclohexyl-L-alanine
  SITE 10: note = Amidated residue
CXGGRIDRIG

SEQ ID NO: 36 - protein, 10 aa, synthetic construct
  SITE 2: note = Beta-cyclohexyl-L-alanine
  SITE 10: note = Amidated residue
CXGGRIDRIG

SEQ ID NO: 37 - protein, 10 aa, synthetic construct
  SITE 2: note = Beta-cyclohexyl-L-alanine
  SITE 10: note = Amidated residue
SXGGRIDRIG

SEQ ID NO: 38 - protein, 10 aa, synthetic construct
  SITE 2: note = Beta-cyclohexyl-L-alanine
  SITE 10: note = Amidated residue
AXGGRIDRIG

SEQ ID NO: 39 - protein, 9 aa, synthetic construct
  SITE 1: note = Beta-cyclohexyl-L-alanine
  SITE 9: note = Amidated residue
XGGRIDRIG

SEQ ID NO: 40 - protein, 9 aa, synthetic construct
  SITE 1: note = Beta-cyclohexyl-L-alanine
  SITE 9: note = Amidated residue
XGGRIDRIG

SEQ ID NO: 41 - protein, 10 aa, synthetic construct
  SITE 2: note = Beta-cyclohexyl-L-alanine
  SITE 10: note = Amidated residue
GXGGRIDRIG

SEQ ID NO: 42 - protein, 11 aa, synthetic construct
  SITE 3: note = Beta-cyclohexyl-L-alanine
  SITE 11: note = Amidated residue
SGXGGRIDRIG

SEQ ID NO: 43 - protein, 12 aa, synthetic construct
  SITE 4: note = Beta-cyclohexyl-L-alanine
  SITE 12: note = Amidated residue
FSGXGGRIDRIG

SEQ ID NO: 44 - protein, 13 aa, synthetic construct
  SITE 5: note = Beta-cyclohexyl-L-alanine
  SITE 13: note = Amidated residue
SFSGXGGRIDRIG

SEQ ID NO: 45 - protein, 14 aa, synthetic construct
  SITE 6: note = Beta-cyclohexyl-L-alanine
  SITE 14: note = Amidated residue
RSFSGXGGRIDRIG

SEQ ID NO: 46 - protein, 13 aa, synthetic construct
  SITE 5: note = Beta-cyclohexyl-L-alanine
  SITE 13: note = Amidated residue
RSSGXGGRIDRIG

SEQ ID NO: 47 - protein, 12 aa, synthetic construct
  SITE 1: note = D-Phenylalanine
  SITE 4: note = Beta-cyclohexyl-L-alanine
  SITE 12: note = Amidated residue
FSGXGGRIDRIG

SEQ ID NO: 48 - protein, 12 aa, synthetic construct
  SITE 1: note = D-Phenylalanine
  SITE 4: note = Beta-cyclohexyl-L-alanine
  SITE 12: note = Amidated residue
FSGXGGRIDRIG

SEQ ID NO: 49 - protein, 12 aa, synthetic construct
  SITE 1: note = D-Phenylalanine
  SITE 3: note = D-Proline
  SITE 4: note = Beta-cyclohexyl-L-alanine
  SITE 12: note = Amidated residue
FSPXGGRIDRIG

SEQ ID NO: 50 - protein, 12 aa, synthetic construct
  SITE 1: note = D-Phenylalanine
  SITE 4: note = Beta-cyclohexyl-L-alanine
  SITE 5: note = D-Alanine
  SITE 12: note = Amidated residue
FSGXAGRIDRIG

SEQ ID NO: 51 - protein, 12 aa, synthetic construct
  SITE 1: note = D-Phenylalanine
  SITE 4: note = Beta-cyclohexyl-L-alanine
  SITE 12: note = Amidated residue
FSGXGGPIDRIG

SEQ ID NO: 52 - protein, 12 aa, synthetic construct
  SITE 1: note = D-Phenylalanine
  SITE 3: note = D-Proline
  SITE 4: note = Beta-cyclohexyl-L-alanine
  SITE 5: note = D-Alanine
  SITE 12: note = Amidated residue
FSPXAGPIDRIG

SEQ ID NO: 53 - protein, 11 aa, synthetic construct
  SITE 1: note = D-Phenylalanine
  SITE 3: note = D-Proline
  SITE 4: note = Beta-cyclohexyl-L-alanine
  SITE 5: note = D-Alanine
  SITE 11: note = Amidated residue
FSPXAGPIDRI

SEQ ID NO: 54 - protein, 11 aa, synthetic construct
  SITE 1: note = D-Phenylalanine
  SITE 3: note = D-Proline
  SITE 4: note = Beta-cyclohexyl-L-alanine
  SITE 5: note = D-Alanine
  SITE 11: note = Methylamine modified residue
FSPXAGPIDRI

SEQ ID NO: 55 - protein, 11 aa, synthetic construct
  SITE 1: note = D-Phenylalanine
  SITE 3: note = D-Proline
  SITE 4: note = Beta-cyclohexyl-L-alanine
  SITE 5: note = D-Alanine
  SITE 10: note = N omega-methyl-L-arginine
  SITE 11: note = Methylamine modified residue
FSPXAGPIDRI

SEQ ID NO: 56 - protein, 11 aa, synthetic construct
  SITE 1: note = D-Phenylalanine
  SITE 3: note = D-Hydroxyproline
  SITE 4: note = Beta-cyclohexyl-L-alanine
  SITE 5: note = D-Alanine
  SITE 7: note = L-Hydroxyproline
  SITE 10: note = N omega-methyl-L-arginine
  SITE 11: note = Methylamine modified residue
FSXXAGXIDRI

SEQ ID NO: 57 - protein, 11 aa, synthetic construct
  SITE 1: note = Eicosanedioic acid modified D-Phenylalanine
  SITE 3: note = D-Hydroxyproline
  SITE 4: note = Beta-cyclohexyl-L-alanine
  SITE 5: note = D-Serine
  SITE 7: note = L-Hydroxyproline
  SITE 10: note = N omega-methyl-L-arginine
  SITE 11: note = Methylamine modified residue
FSXXSGXIDRI

SEQ ID NO: 58 - protein, 21 aa, synthetic construct
  SITE 1: note = (2-[2-(2-amino-ethoxy)-ethoxy]-acetyl)3 modified D-Phenylalanine
  SITE 3: note = D-Proline
  SITE 4: note = Beta-cyclohexyl-L-alanine
  SITE 5: note = D-Alanine
FSPXAGPIDRIGGGGSGGGGS

SEQ ID NO: 59 - protein, 31 aa, synthetic construct
  SITE 11: note = D-Phenylalanine
  SITE 13: note = D-Proline
  SITE 14: note = Beta-cyclohexyl-L-alanine
  SITE 15: note = D-Alanine
GGGGSGGGGSFSPXAGPIDRIGGGGSGGGGS

SEQ ID NO: 60 - protein, 20 aa, synthetic construct
GGGGSGGGGSGGGGSGGGGS

SEQ ID NO: 61 - protein, 20 aa, synthetic construct
  SITE 1: note = (2-[2-(2-amino-ethoxy)-ethoxy]-acetyl)3 modified residue
GGGGSGGGGSGGGGSGGGGS

SEQ ID NO: 62 - protein, 20 aa, synthetic construct
GGGGHGGGGHGGGGHGGGGH

SEQ ID NO: 63 - protein, 20 aa, synthetic construct
  SITE 5: note = 4-Pyridyl-L-Alanine
  SITE 10: note = 4-Pyridyl-L-Alanine
  SITE 15: note = 4-Pyridyl-L-Alanine
  SITE 20: note = 4-Pyridyl-L-Alanine
GGGGXGGGGXGGGGXGGGGX

SEQ ID NO: 64 - protein, 21 aa, synthetic construct
GGGGSHHHGGGGSHHHGGGGS

SEQ ID NO: 65 - protein, 10 aa, synthetic construct
  SITE 1: note = (2-[2-(2-amino-ethoxy)-ethoxy]-acetyl)3 modified residue
GGGGSGGGGS

SEQ ID NO: 66 - protein, 30 aa, synthetic construct
GGGGSGGGGSGGGGSGGGGSGGGGSGGGGS

SEQ ID NO: 67 - protein, 21 aa, synthetic construct
GGGGSGGGGSGGGGSGGGGSP

SEQ ID NO: 68 - protein, 21 aa, synthetic construct
  SITE 5: note = 4-Pyridyl-L-Alanine
  SITE 10: note = 4-Pyridyl-L-Alanine
  SITE 15: note = 4-Pyridyl-L-Alanine
  SITE 20: note = 4-Pyridyl-L-Alanine
GGGGXGGGGXGGGGXGGGGXP

SEQ ID NO: 69 - protein, 30 aa, synthetic construct
  SITE 5: note = 4-Pyridyl-L-Alanine
  SITE 10: note = 4-Pyridyl-L-Alanine
  SITE 15: note = 4-Pyridyl-L-Alanine
  SITE 20: note = 4-Pyridyl-L-Alanine
  SITE 25: note = 4-Pyridyl-L-Alanine
  SITE 30: note = 4-Pyridyl-L-Alanine
GGGGXGGGGXGGGGXGGGGXGGGGXGGGGX

SEQ ID NO: 70 - protein, 30 aa, synthetic construct
GGGGEGGGGEGGGGSGGGGSGGGGSGGGGS

SEQ ID NO: 71 - protein, 30 aa, synthetic construct
GGGGEGGGGSGGGGEGGGGSGGGGEGGGGS

SEQ ID NO: 72 - protein, 30 aa, synthetic construct
GGGGEGGGGEGGGGEKEKEKGGGGSGGGGS

SEQ ID NO: 73 - protein, 11 aa, synthetic construct
GSPSSGAPPPS

SEQ ID NO: 74 - protein, 540 aa, Homo sapiens
MPSLLVLTFSPCVLLGWALLAGGTGGGGVGGGGGGAGIGGGRQEREALPPQKIEVLVLLPQDDSYLFSLTRVRPAIEYALRSVEGNGTGRRLLPPGTRFQVAYEDSDCGNRALFSLVDRVAAARGAKPDLILGPVCEYAAAPVARLASHWDLPMLSAGALAAGFQHKDSEYSHLTRVAPAYAKMGEMMLALFRHHHWSRAALVYSDDKLERNCYFTLEGVHEVFQEEGLHTSIYSFDETKDLDLEDIVRNIQASERVVIMCASSDTIRSIMLVAHRHGMTSGDYAFFNIELFNSSSYGDGSWKRGDKHDFEAKQAYSSLQTVTLLRTVKPEFEKFSMEVKSSVEKQGLNMEDYVNMFVEGFHDAILLYVLALHEVLRAGYSKKDGGKIIQQTWNRTFEGIAGQVSIDANGDRYGDFSVIAMTDVEAGTQEVIGDYFGKEGRFEMRPNVKYPWGPLKLRIDENRIVEHTNSSPCKSSGGLEESAVTGIVVGALLGAGLLMAFYFFRKKYRITIERRTQQEESNLGKHELREDSIRSHFSVA

SEQ ID NO: 75 - protein, 540 aa, Homo sapiens
MPSLLVLTFSPCVLLGWALLAGGTGGGGVGGGGGGAGIGGGRQEREALPPQKIEVLVLLPQDDSYLFSLTRVRPAIEYALRSVEGNGTGRRLLPPGTRFQVAYEDSDCGNRALFSLVDRVAAARGAKPDLILGPVCEYAAAPVARLASHWDLPMLSAGALAAGFQHKDSEYSHLTRVAPAYAKMGEMMLALFRHHHWSRAALVYSDDKLERNCYFTLEGVHEVFQEEGLHTSIYSFDETKDLDLEDIVRNIQASERVVIMCASSDTIRSIMLVAHRHGMTSGDYAFFNIELFNSSSYGDGSWKRGDKHDFEAKQAYSSLQTVTLLRTVKPEFEKFSMEVKSSVEKQGLNMEDYVNMFVEGFHDAILLYVLALHEVLRAGYSKKDGGKIIQQTWNRTFEGIAGQVSIDANGDRYGDFSVIAMTDVEAGTQEVIGDYFGKEGRFEMRPNVKYPWGPLKLRIDENRIVEHTNSSPCKSCGLEESAVTGIVVGALLGAGLLMAFYFFRKKYRITIERRTQQEESNLGKHRELREDSIRSHFSVA

SEQ ID NO: 76 - DNA, 8853 bp, Homo sapiens
  source 1..8853: mol_type = genomic DNA
agtggcaggagcgccgcgcaccgccagccgcagggggcgtgggatgggggcggccggggaggggggcgcccacactgactagagccaaccgcgcacttcaaaagggtgtcggtgccgcgctcccctcccgcggcccgggaacttcaaagcgggccgtgctgccccggctgcctcgctctgctctggggcctcgcagccccggcgcggccgcctggtggcgatgacccgggcgctctgctcagcgctccgccaggctctcctgctgctcgcagcggccgccgagctctcgccaggactgaagtgtgtatgtcttttgtgtgattcttcaaacttcacctgccaaacagaaggagcatgttgggcatcagtcatgctaaccaatggaaaagagcaggtgatcaaatcctgtgtctcccttccagaactgaatgctcaagtcttctgtcatagttccaacaatgttaccaaaaccgaatgctgcttcacagatttttgcaacaacataacactgcaccttccaacagcatcaccaaatgccccaaaacttggacccatggagctggccatcattattactgtgcctgtttgcctcctgtccatagctgcgatgctgacagtatgggcatgccagggtcgacagtgctcctacaggaagaaaaagagaccaaatgtggaggaaccactctctgagtgcaatctggtaaatgctggaaaaactctgaaagatctgatttatgatgtgaccgcctctggatctggctctggtctacctctgttggttcaaaggacaattgcaaggacgattgtgcttcaggaaatagtaggaaaaggtagatttggtgaggtgtggcatggaagatggtgtggggaagatgtggctgtgaaaatattctcctccagagatgaaagatcttggtttcgtgaggcagaaatttaccagacggtcatgctgcgacatgaaaacatccttggtttcattgctgctgacaacaaagataatggaacttggactcaactttggctggtatctgaatatcatgaacagggctccttatatgactatttgaatagaaatatagtgaccgtggctggaatgatcaagctggcgctctcaattgctagtggtctggcacaccttcatatggagattgttggtacacaaggtaaacctgctattgctcatcgagacataaaatcaaagaatatcttagtgaaaaagtgtgaaacttgtgccatagcggacttagggttggctgtgaagcatgattcaatactgaacactatcgacatacctcagaatcctaaagtgggaaccaagaggtatatggctcctgaaatgcttgatgatacaatgaatgtgaatatctttgagtccttcaaacgagctgacatctattctgttggtctggtttactgggaaatagcccggaggtgttcagtcggaggaattgttgaggagtaccaattgccttattatgacatggtgccttcagatccctcgatagaggaaatgagaaaggttgtttgtgaccagaagtttcgaccaagtatcccaaaccagtggcaaagttgtgaagcactccgagtcatggggagaataatgcgtgagtgttggtatgccaacggagcggcccgcctaactgctcttcgtattaagaagactatatctcaactttgtgtcaaagaagactgcaaagcctaatgatgataattatgttaaaaagaaatctctcatagctttcttttccattttcccctttatgtgaatgtttttgccattttttttttgttctacctcaaagataagacagtacagtatttaagtgcccataaggcagcatgaaaagataactctaaagttaagcatgggcaggagttgacttcatccaatctctatgttatgtttaattttattttgaaagcaacacctcaactcatctttttatttaataaggaagaaatatattacaaaagtataaaataagctctataaaaatgttatagtcattaagtttttattttacttgaaccaagagcacatgaatgaacaggaaaagatgtaaaaacatttttttctgagatgaaaacatattaattaaacatgcaaattagagcatgctatctttaggtgatgcaatctatgtttccccctttttaagttagcaggactttttaaaaataaatattgctctaaactttaatatatcgaacgtgagagtggagctgcttagtggaagatgtaagtgaggtgggtgtcccatgtgcttggtctccccttctgctgttctcctgttcttcataatccactactgcagcagtccctgaaccactaaacttgttcctttcatttacaaaagagatacctgacatcctgagacactgagaaatgtcctgaagtcacacagctaatggcagaactggcactaggtccaaatcttgtgataatgaacaccgtaaggttagctagcttcctactttcccttgaatagtgcttttctccctatgtaatatcttttattatgatatttgtggtttagaaggcatattgagttattttgcagaatcataatggacccgcacaaaatctcagaaccatatctgttgacattttttctcatagaaatatcatggttaccccatttgttaatgagcattaatgttttctgaacacttccaaagattaatcaaacataaatattcattgtctgaaaatgtctttaagatacaattcagaggtccctatttcctttgtacatacacacttagaaagaaaagacagaaaaggaagaggaaggaaggaaatattttgagaatatattgagaagaattaagaaaactcttcaatgaagtgttaacaaccaaaccctacagacggtatcagaaacagcaaatagatattcctctaccctttcacagtgagtgagtgagtacagaagaatgctcatgatagttttgccttcattctactttctgtggacacagagtaatgaatatttaatgggacattaaatatgcccttcaaatctataattttactttggtaaacgagatttaacatgatgtcttttatgctcctaaaacatcttttttcaaactccattccttagaacattcttctactgagatgatccaagaccaaaagtgttctttggtacttgcttataaagtgatagtacatgttagcatataatgtattttgaagagtgaagtaaatgctattgataacagtaaaaaaaaaaaaaaaaactaataacagtaaagaaatgctacttgatttttttttaaactggattgctcagattacctgatcgtggtggaacccttttattaagaggaggggaaactttttactatcccatatttaactgttctataaagcaaagcacagcttgggtaatagcgttctgaaggatatacttctgtattttctcatagagtacaatttagtgattatgcttcatttcactatggaaatatgttactgaatctatcttcattttactgagttgaaataaggaaggcaaaaaactgacagctatggagtttgcgtgtacttccatactcgttaatgctctcatccacttattaaataatcatagagcacccatatcttgcttgccacaatatcgggtacaagagggaatacaaagatagataggtcctgccctcagggattttaaagtctaatttgggaatgggaatagggatgtgagtgtgtgggggaagagattaaattgacagataaaatacgaagtgggatgtcttgagttctgcatgacagtgggtttctaggataggtctgaaaattgctttcatttgcaacacatttagaaagtagctttatttggatattacagacaatctaaatatatcatcagtttttaaaagtgcctatgtgaagtgatttttaaaaagagcctatgtgaaggggtaatcttgcttgttcttgttactaatttctcatagattgtttttctgcatatataagaacgaaattatttatttactatggttgtacgtgcctcaaataaacaagaatgatatttcctgttttatttacttatgttgggtaaatatgcttattgaatttttaagagaggattttttaccatctccatttttcttgtcattatgttttgtagcttatttgagggtgtctaaatataatttcatattttattggttcaactttcactctgaagaaatccgtatgttagtacattttgaggtatttttcttgttcttgtgttgtttaactatgactcctaactgagtagtcttatatttcaattacaaaatacattttttaagaaagggaatagagcagcaaaaatgataaggaaaatgttaaaagttgtaatatttcctttactcttaacaggattatatatagaacatgctcacttacaaaaataggatgatgaagtttagagcataaggcaggcttcttgtatatacttatgctgtcaaatgttatattgtttttaatggagtcccattgtgtaatatttatttcttttacattttgttataagcaaaaaaaaaaaaaattctccttaggttatgttcagagtatcagtgttctttactccttacagatattttggctttggggtataatacaagacttgggaaaacactattatgaattttcagtactgtataaagtggtgatgggatttaaatgcagcatcactttctgaaaataagagaaacattatttgttgtcagtatttcagcatgaacttgttgccttgtaaattttgcctttaagtttgtaattggtacagattctgttgtatgctttcttctatgtctaaaatatttggcatgtcacatctagaattcttaatttatgttctgacttgagagttaagtgaaacatgactgtcgtgcactattttaggcatagcacttgcttttcatctttatactttcaattaactttgcattttaaatttccatgattgtatgaaaatagtaacctggttgcagtatctgaaaaaattaaaattagcttttatttaaaaatgaaaatctacaatagattcattaggttagaagttccagaataatttattattttattacacctactattgtagaattactaataaaacaaaacaaaactactcctattttcctggaattttgccaccatgtgacttattggggcagagaaaactcagggttgtctttgagtctgcacaaaagcaccagggaacctgcttagcaaatcgtctgaaaacagggagctgatgtttgccattatacaaagtttgagtaaacaacttaaaattgcttgttagggcatagtctttgattgaaataagtatgagaatgtatttggctaaataaatgtatttaaaatatacaaattttatttcccactggaaaattaagaaagtagcagtaccaaatgaataaaagctggcagttgatgtcttcaataatcattcctttaaaataaattcacaaacacatcattacaagctacttagaaatgtttagtattcgtatcttaaaatggcaccattgtggttttcaaagatattttaaacatcttttgtgaaacatactatttctgtttgacaatgctttgttctagctctgtgtgctgatacctacatggagtttttctgctattttagtgaaaacagtaattcttttatcttgagagctgcttctaaataacaaaaaagttaattggaatgtaagtttttaaaaaatgttaatattaaatagaatttttataatatgggcatttttcaaaacattttaatgaaaatatatagatatttgactttctttttttcatctagccttgctttatatttcattatttttctcactttttttcttaatattccctcactatctttcaacattatcattagttcctaattttaaaaataactcttatttaacttaaccgtctggaatttagccttctaatgaaagagaatcccttagtactctcagagattatataaagttattccaattttgtgtagatgacgaaaccaaggatcagagattaaatgactactagttactagcagaactcttatgaaagcctggtggtgacacccagcactgttccctgccatatccccaacttttactgattaaaaattaattcgcatgcatctaaacctaccttgaatgcacactaacgtaatgtgccattcaatgatgatgataaaatcccacttttctttgggtttctactaaaataatttactcactcagagtgaggtcaatgagaaaaactaaactaggctaagaaagagttgtagaatggttgttgagctaagtaggcaaccactggggtgctgataaaattaatggataaaatttaggaactgtgagagtatagaatttcttagtgcaagtaatgattagagaagcttcctgacatcccccaccctttctgtaaggactgttctttctctttgtaccttggaatgggggtgaaaggtgatttgatagctgaatttgggactatgtccagtgggatattatctaacttttctctctttctcttttttttcccctcagtttctcattagtttgtctttggcattcatcttcttttagtgcattaaaaaatgtttggcagatctcatcaatcccaagtcactctataattcctgtatttctttagttgtcgtttaacctgtccaaacttctacacaatgaacttcttaacaagattttaagttctctgtataagaggtttcacctcataacttctccagtaatccttcatttggcactatagagtatttgttaatggcagagatgatttttcttttaaaacctaaaaagactagctgttatttgtattctagcttttagctaacatataaagaatgtctacttttgctttaatgctaaattccgcttgagaaatagtaactgggaaagacaatttgaaatatatgccccataatgtgattgttaaatttatttctgctgttccataccattgctttgttttgcttttgacaaactaagccattatgctattagtttggaatataatactacagcaaaattaggtaacaatccctattttaaaattcccctaacaataatagaactgccagcatacttttctctttcagttgtagatgaatacattcgagagaatatgagctgtatttcatcctagattttaatattttcagatgtgactgtatttcctgatcattggtccaagttgtcctaaaagaaatttttctctccagacctaacagttttaactgcaagagtttactgtgggttatgttaatctgaattttaatagggccactaagaatctgagtgccttaggagattacccttatacccactgccatcacatccagtcaggcctgttgtgctctatataaatcttcccagctgaggggcaggtgcgggctaaaatccaactgcaattggctcccagacataattttatattttacagagaagcatcttattggcttatatgtgtttaaagaatggtctggcttatacatcttcagaaaatgagaattaaaaagtcaaaataattcttgacatctacagattgaacaaagaacttagaagaaataatactttatcttttcatcctggcattcctgagagaagagaaattgattgtttatcatgttggtttaatttttcaacccagacaatctgcagcaaggcacatggaccccaattttgatatcgtccatacagttttcattctatgcatggagctaattactgactttgcctgtaaagagaggattgtgtgcctaaattttgtctaacaaatgcaagcgtagaatgacatttactaatatttctatttcttccataggctaaataatagtaactaagtatttttaaggacacagccctttttttctctttatacaaaatgagagtatctgagccaaaatattaaattctagttcttttccgcaatgactagtgtcaagctcatgtactcttctgattctagactggagaagattattcaaacttgatctgtgtttcaggtttttaaatgtcctaaaaacagaaaattagattcagatctcaaaaaaggaattttggattgactttcaaagtactaatactaattatacttttcttttggtagcgtgactcttcttatacctaagaacatattacaaatgtcaaaaccattgcattttgacattgcaaaacatgccttgaactcttgaactactgtgaaaagaatcaccgttgtaaagactttttgtaagctagctgatactcttaagtatgtaaaaagattgtctttcagccgacaggcccaaaggaatgtatataaggaaggaatatgaaaaaataaattaggttttaaaataggaattgggcaataaactgtatcaaaaatatgtagatggattttagtagttgtaatttaaatgtggaaggtgaagagaatttcaaactccaaagagaaatgaatgatattcagatgtttcattaatttctagtctgtgaaaatatgcattttatagtaatatgtatagacttattttatttagaaataatagtgttttagaatttattaaaaactcagtgatagcctttataccaaaatgtttaactttaccaacagcaagtcataaaagtatttattttaaagctttttaatattatcgtgtaactttcatctgtcttcagatgtaaataattatctgcctaaatgttatatttttatgtatgcattttctgaaaatgtattgttttgtaaagtgggaaagataataaatcaagcacttcttgcacttgtttctgtgaagcatatagaactctattttaaataaaggaagatgtgtcgta

SEQ ID NO: 77 - protein, 493 aa, Homo sapiens
MTRALCSALRQALLLLAAAAELSPGLKCVCLLCDSSNFTCQTEGACWASVMLTNGKEQVIKSCVSLPELNAQVFCHSSNNVTKTECCFTDFCNNITLHLPTASPNAPKLGPMELAIIITVPVCLLSIAAMLTVWACQGRQCSYRKKKRPNVEEPLSECNLVNAGKTLKDLIYDVTASGSGSGLPLLVQRTIARTIVLQEIVGKGRFGEVWHGRWCGEDVAVKIFSSRDERSWFREAEIYQTVMLRHENILGFIAADNKDNGTWTQLWLVSEYHEQGSLYDYLNRNIVTVAGMIKLALSIASGLAHLHMEIVGTQGKPAIAHRDIKSKNILVKKCETCAIADLGLAVKHDSILNTIDIPQNPKVGTKRYMAPEMLDDTMNVNIFESFKRADIYSVGLVYWEIARRCSVGGIVEEYQLPYYDMVPSDPSIEEMRKVVCDQKFRPSIPNQWQSCEALRVMGRIMRECWYANGAARLTALRIKKTISQLCVKEDCKA

SEQ ID NO: 78 - RNA, 21 nt, synthetic construct
  source 1..21: mol_type = other RNA
ttttattttacttgaaccaaa

SEQ ID NO: 79 - RNA, 21 nt, synthetic construct
  source 1..21: mol_type = other RNA
cccgcctaactgctcttcgta

SEQ ID NO: 80 - RNA, 21 nt, synthetic construct
  source 1..21: mol_type = other RNA
ctaatgatgataattatgtta

SEQ ID NO: 81 - RNA, 21 nt, synthetic construct
  source 1..21: mol_type = other RNA
aagtataaaataagctctata

SEQ ID NO: 82 - RNA, 21 nt, synthetic construct
  source 1..21: mol_type = other RNA
tccattttcccctttatgtga

SEQ ID NO: 83 - RNA, 21 nt, synthetic construct
  source 1..21: mol_type = other RNA
atgttaaaaagaaatctctca

SEQ ID NO: 84 - RNA, 21 nt, synthetic construct
  source 1..21: mol_type = other RNA
ataagacagtacagtatttaa

SEQ ID NO: 85 - RNA, 21 nt, synthetic construct
  source 1..21: mol_type = other RNA
aactctaaagttaagcatgga

SEQ ID NO: 86 - RNA, 21 nt, synthetic construct
  source 1..21: mol_type = other RNA
tttaattttattttgaaagca

SEQ ID NO: 87 - RNA, 21 nt, synthetic construct
  source 1..21: mol_type = other RNA
gttatagtcattaagttttta

SEQ ID NO: 88 - RNA, 21 nt, synthetic construct
  source 1..21: mol_type = other RNA
tttatgtgaatgtttttgcca

SEQ ID NO: 89 - RNA, 21 nt, synthetic construct
  source 1..21: mol_type = other RNA
ttatgacatggtgccttcaga

SEQ ID NO: 90 - RNA, 21 nt, synthetic construct
  source 1..21: mol_type = other RNA
tcaaagaagactgcaaagcca

SEQ ID NO: 91 - RNA, 21 nt, synthetic construct
  source 1..21: mol_type = other RNA
tgaaaagataactctaaagta

SEQ ID NO: 92 - RNA, 21 nt, synthetic construct
  source 1..21: mol_type = other RNA
tttacttgaaccaagagcaca

SEQ ID NO: 93 - RNA, 21 nt, synthetic construct
  source 1..21: mol_type = other RNA
caactcatctttttatttaaa

SEQ ID NO: 94 - RNA, 21 nt, synthetic construct
  source 1..21: mol_type = other RNA
atgatgataattatgttaaaa

SEQ ID NO: 95 - RNA, 21 nt, synthetic construct
  source 1..21: mol_type = other RNA
tatattacaaaagtataaaaa

SEQ ID NO: 96 - RNA, 21 nt, synthetic construct
  source 1..21: mol_type = other RNA
gtgatagtacatgttagcata

SEQ ID NO: 97 - RNA, 21 nt, synthetic construct
  source 1..21: mol_type = other RNA
ttgccttattatgacatggta

SEQ ID NO: 98 - RNA, 21 nt, synthetic construct
  source 1..21: mol_type = other RNA
tagcatataatgtattttgaa

SEQ ID NO: 99 - RNA, 21 nt, synthetic construct
  source 1..21: mol_type = other RNA
acttctgtattttctcataga

SEQ ID NO: 100 - RNA, 21 nt, synthetic construct
  source 1..21: mol_type = other RNA
ttttgtgtgattcttcaaaca

SEQ ID NO: 101 - RNA, 21 nt, synthetic construct
  source 1..21: mol_type = other RNA
tctaaagttaagcatgggcaa

SEQ ID NO: 102 - RNA, 21 nt, synthetic construct
  source 1..21: mol_type = other RNA
gacatggtgccttcagatcca

SEQ ID NO: 103 - RNA, 21 nt, synthetic construct
  source 1..21: mol_type = other RNA
gcccgcctaactgctcttcga

SEQ ID NO: 104 - RNA, 21 nt, synthetic construct
  source 1..21: mol_type = other RNA
tcaaagaatatcttagtgaaa

SEQ ID NO: 105 - RNA, 21 nt, synthetic construct
  source 1..21: mol_type = other RNA
gtatcccaaaccagtggcaaa

SEQ ID NO: 106 - RNA, 21 nt, synthetic construct
  source 1..21: mol_type = other RNA
ttttattatgatatttgtgga

SEQ ID NO: 107 - RNA, 21 nt, synthetic construct
  source 1..21: mol_type = other RNA
tttttttaaactggattgcta

SEQ ID NO: 108 - RNA, 21 nt, synthetic construct
  source 1..21: mol_type = other RNA
tgtcttttgtgtgattcttca

SEQ ID NO: 109 - RNA, 21 nt, synthetic construct
  source 1..21: mol_type = other RNA
ctctaaagttaagcatgggca

SEQ ID NO: 110 - RNA, 21 nt, synthetic construct
  source 1..21: mol_type = other RNA
ttttacttgaaccaagagcaa

SEQ ID NO: 111 - RNA, 21 nt, synthetic construct
  source 1..21: mol_type = other RNA
tcctgaaatgcttgatgataa

SEQ ID NO: 112 - RNA, 21 nt, synthetic construct
  source 1..21: mol_type = other RNA
tgaaatgcttgatgatacaaa

SEQ ID NO: 113 - RNA, 21 nt, synthetic construct
  source 1..21: mol_type = other RNA
caaggtaaacctgctattgca

SEQ ID NO: 114 - RNA, 21 nt, synthetic construct
  source 1..21: mol_type = other RNA
gggctccttatatgactatta

SEQ ID NO: 115 - RNA, 21 nt, synthetic construct
  source 1..21: mol_type = other RNA
ggctcctgaaatgcttgatga

SEQ ID NO: 116 - RNA, 21 nt, synthetic construct
  source 1..21: mol_type = other RNA
tttattttacttgaaccaaga

SEQ ID NO: 117 - RNA, 21 nt, synthetic construct
  source 1..21: mol_type = other RNA
ttgatgatacaatgaatgtga

SEQ ID NO: 118 - RNA, 21 nt, synthetic construct
  source 1..21: mol_type = other RNA
tgattcaatactgaacactaa

SEQ ID NO: 119 - RNA, 21 nt, synthetic construct
  source 1..21: mol_type = other RNA
atctattctgttggtctggta

SEQ ID NO: 120 - RNA, 21 nt, synthetic construct
  source 1..21: mol_type = other RNA
agttgacttcatccaatctca

SEQ ID NO: 121 - RNA, 21 nt, synthetic construct
  source 1..21: mol_type = other RNA
ctcatcgagacataaaatcaa

SEQ ID NO: 122 - RNA, 21 nt, synthetic construct
  source 1..21: mol_type = other RNA
tacctcaaagataagacagta

SEQ ID NO: 123 - RNA, 21 nt, synthetic construct
  source 1..21: mol_type = other RNA
tatagtcattaagtttttata

SEQ ID NO: 124 - RNA, 21 nt, synthetic construct
  source 1..21: mol_type = other RNA
caaagataagacagtacagta

SEQ ID NO: 125 - RNA, 21 nt, synthetic construct
  source 1..21: mol_type = other RNA
aaagaatatcttagtgaaaaa

SEQ ID NO: 126 - RNA, 21 nt, synthetic construct
  source 1..21: mol_type = other RNA
accaattgccttattatgaca

SEQ ID NO: 127 - RNA, 21 nt, synthetic construct
  source 1..21: mol_type = other RNA
tttttgttctacctcaaagaa

SEQ ID NO: 128 - RNA, 21 nt, synthetic construct
  source 1..21: mol_type = other RNA
ttccattttcccctttatgta

SEQ ID NO: 129 - RNA, 21 nt, synthetic construct
  source 1..21: mol_type = other RNA
ctacctcaaagataagacaga

SEQ ID NO: 130 - RNA, 21 nt, synthetic construct
  source 1..21: mol_type = other RNA
aatcaaagaatatcttagtga

SEQ ID NO: 131 - RNA, 21 nt, synthetic construct
  source 1..21: mol_type = other RNA
atgcttgatgatacaatgaaa

SEQ ID NO: 132 - RNA, 21 nt, synthetic construct
  source 1..21: mol_type = other RNA
taggtgatgcaatctatgtta

SEQ ID NO: 133 - RNA, 21 nt, synthetic construct
  source 1..21: mol_type = other RNA
atatctcaactttgtgtcaaa

SEQ ID NO: 134 - RNA, 21 nt, synthetic construct
  source 1..21: mol_type = other RNA
atgaatgtgaatatctttgaa

SEQ ID NO: 135 - RNA, 21 nt, synthetic construct
  source 1..21: mol_type = other RNA
ttcaaacgagctgacatctaa

SEQ ID NO: 136 - RNA, 21 nt, synthetic construct
  source 1..21: mol_type = other RNA
aaaaataaatattgctctaaa

SEQ ID NO: 137 - RNA, 21 nt, synthetic construct
  source 1..21: mol_type = other RNA
ctctcatagctttcttttcca

SEQ ID NO: 138 - RNA, 21 nt, synthetic construct
  source 1..21: mol_type = other RNA
atagaggaaatgagaaaggta

SEQ ID NO: 139 - RNA, 21 nt, synthetic construct
  source 1..21: mol_type = other RNA
gtgaaaaagtgtgaaacttga

SEQ ID NO: 140 - RNA, 21 nt, synthetic construct
  source 1..21: mol_type = other RNA
tggactcaactttggctggta

SEQ ID NO: 141 - RNA, 21 nt, synthetic construct
  source 1..21: mol_type = other RNA
ttaagtttttattttacttga

SEQ ID NO: 142 - RNA, 21 nt, synthetic construct
  source 1..21: mol_type = other RNA
gaagatgtggctgtgaaaata

SEQ ID NO: 143 - RNA, 21 nt, synthetic construct
  source 1..21: mol_type = other RNA
tatgttaaaaagaaatctcta

SEQ ID NO: 144 - RNA, 21 nt, synthetic construct
  source 1..21: mol_type = other RNA
taatgatgataattatgttaa

SEQ ID NO: 145 - RNA, 21 nt, synthetic construct
  source 1..21: mol_type = other RNA
gataattatgttaaaaagaaa

SEQ ID NO: 146 - RNA, 21 nt, synthetic construct
  source 1..21: mol_type = other RNA
gactgcaaagcctaatgatga

SEQ ID NO: 147 - RNA, 21 nt, synthetic construct
  source 1..21: mol_type = other RNA
cattaagtttttattttacta

SEQ ID NO: 148 - RNA, 21 nt, synthetic construct
  source 1..21: mol_type = other RNA
actgctcttcgtattaagaaa

SEQ ID NO: 149 - RNA, 21 nt, synthetic construct
  source 1..21: mol_type = other RNA
ttatgttaaaaagaaatctca

SEQ ID NO: 150 - RNA, 21 nt, synthetic construct
  source 1..21: mol_type = other RNA
gttgacttcatccaatctcta

SEQ ID NO: 151 - RNA, 21 nt, synthetic construct
  source 1..21: mol_type = other RNA
cctgaaatgcttgatgataca

SEQ ID NO: 152 - RNA, 21 nt, synthetic construct
  source 1..21: mol_type = other RNA
gaaatgcttgatgatacaata

SEQ ID NO: 153 - RNA, 21 nt, synthetic construct
  source 1..21: mol_type = other RNA
tccttatatgactatttgaaa

SEQ ID NO: 154 - RNA, 23 nt, synthetic construct
  source 1..23: mol_type = other RNA
tttggttcaagtaaaataaaaac

SEQ ID NO: 155 - RNA, 23 nt, synthetic construct
  source 1..23: mol_type = other RNA
tacgaagagcagttaggcgggcc

SEQ ID NO: 156 - RNA, 23 nt, synthetic construct
  source 1..23: mol_type = other RNA
taacataattatcatcattaggc

SEQ ID NO: 157 - RNA, 23 nt, synthetic construct
  source 1..23: mol_type = other RNA
tatagagcttattttatactttt

SEQ ID NO: 158 - RNA, 23 nt, synthetic construct
  source 1..23: mol_type = other RNA
tcacataaaggggaaaatggaaa

SEQ ID NO: 159 - RNA, 23 nt, synthetic construct
  source 1..23: mol_type = other RNA
tgagagatttctttttaacataa

SEQ ID NO: 160 - RNA, 23 nt, synthetic construct
  source 1..23: mol_type = other RNA
ttaaatactgtactgtcttatct

SEQ ID NO: 161 - RNA, 23 nt, synthetic construct
  source 1..23: mol_type = other RNA
tccatgcttaactttagagttat

SEQ ID NO: 162 - RNA, 23 nt, synthetic construct
  source 1..23: mol_type = other RNA
tgctttcaaaataaaattaaaca

SEQ ID NO: 163 - RNA, 23 nt, synthetic construct
  source 1..23: mol_type = other RNA
taaaaacttaatgactataacat

SEQ ID NO: 164 - RNA, 23 nt, synthetic construct
  source 1..23: mol_type = other RNA
tggcaaaaacattcacataaagg

SEQ ID NO: 165 - RNA, 23 nt, synthetic construct
  source 1..23: mol_type = other RNA
tctgaaggcaccatgtcataata

SEQ ID NO: 166 - RNA, 23 nt, synthetic construct
  source 1..23: mol_type = other RNA
tggctttgcagtcttctttgaca

SEQ ID NO: 167 - RNA, 23 nt, synthetic construct
  source 1..23: mol_type = other RNA
tactttagagttatcttttcatg

SEQ ID NO: 168 - RNA, 23 nt, synthetic construct
  source 1..23: mol_type = other RNA
tgtgctcttggttcaagtaaaat

SEQ ID NO: 169 - RNA, 23 nt, synthetic construct
  source 1..23: mol_type = other RNA
tttaaataaaaagatgagttgag

SEQ ID NO: 170 - RNA, 23 nt, synthetic construct
  source 1..23: mol_type = other RNA
ttttaacataattatcatcatta

SEQ ID NO: 171 - RNA, 23 nt, synthetic construct
  source 1..23: mol_type = other RNA
tttttatacttttgtaatatatt

SEQ ID NO: 172 - RNA, 23 nt, synthetic construct
  source 1..23: mol_type = other RNA
tatgctaacatgtactatcactt

SEQ ID NO: 173 - RNA, 23 nt, synthetic construct
  source 1..23: mol_type = other RNA
taccatgtcataataaggcaatt

SEQ ID NO: 174 - RNA, 23 nt, synthetic construct
  source 1..23: mol_type = other RNA
ttcaaaatacattatatgctaac

SEQ ID NO: 175 - RNA, 23 nt, synthetic construct
  source 1..23: mol_type = other RNA
tctatgagaaaatacagaagtat

SEQ ID NO: 176 - RNA, 23 nt, synthetic construct
  source 1..23: mol_type = other RNA
tgtttgaagaatcacacaaaaga

SEQ ID NO: 177 - RNA, 23 nt, synthetic construct
  source 1..23: mol_type = other RNA
ttgcccatgcttaactttagagt

SEQ ID NO: 178 - RNA, 23 nt, synthetic construct
  source 1..23: mol_type = other RNA
tggatctgaaggcaccatgtcat

SEQ ID NO: 179 - RNA, 23 nt, synthetic construct
  source 1..23: mol_type = other RNA
tcgaagagcagttaggcgggccg

SEQ ID NO: 180 - RNA, 23 nt, synthetic construct
  source 1..23: mol_type = other RNA
tttcactaagatattctttgatt

SEQ ID NO: 181 - RNA, 23 nt, synthetic construct
  source 1..23: mol_type = other RNA
tttgccactggtttgggatactt

SEQ ID NO: 182 - RNA, 23 nt, synthetic construct
  source 1..23: mol_type = other RNA
tccacaaatatcataataaaaga

SEQ ID NO: 183 - RNA, 23 nt, synthetic construct
  source 1..23: mol_type = other RNA
tagcaatccagtttaaaaaaaaa

SEQ ID NO: 184 - RNA, 23 nt, synthetic construct
  source 1..23: mol_type = other RNA
tgaagaatcacacaaaagacata

SEQ ID NO: 185 - RNA, 23 nt, synthetic construct
  source 1..23: mol_type = other RNA
tgcccatgcttaactttagagtt

SEQ ID NO: 186 - RNA, 23 nt, synthetic construct
  source 1..23: mol_type = other RNA
ttgctcttggttcaagtaaaata

SEQ ID NO: 187 - RNA, 23 nt, synthetic construct
  source 1..23: mol_type = other RNA
ttatcatcaagcatttcaggagc

SEQ ID NO: 188 - RNA, 23 nt, synthetic construct
  source 1..23: mol_type = other RNA
tttgtatcatcaagcatttcagg

SEQ ID NO: 189 - RNA, 23 nt, synthetic construct
  source 1..23: mol_type = other RNA
tgcaatagcaggtttaccttgtg

SEQ ID NO: 190 - RNA, 23 nt, synthetic construct
  source 1..23: mol_type = other RNA
taatagtcatataaggagccctg

SEQ ID NO: 191 - RNA, 23 nt, synthetic construct
  source 1..23: mol_type = other RNA
tcatcaagcatttcaggagccat

SEQ ID NO: 192 - RNA, 23 nt, synthetic construct
  source 1..23: mol_type = other RNA
tcttggttcaagtaaaataaaaa

SEQ ID NO: 193 - RNA, 23 nt, synthetic construct
  source 1..23: mol_type = other RNA
tcacattcattgtatcatcaagc

SEQ ID NO: 194 - RNA, 23 nt, synthetic construct
  source 1..23: mol_type = other RNA
ttagtgttcagtattgaatcatg

SEQ ID NO: 195 - RNA, 23 nt, synthetic construct
  source 1..23: mol_type = other RNA
taccagaccaacagaatagatgt

SEQ ID NO: 196 - RNA, 23 nt, synthetic construct
  source 1..23: mol_type = other RNA
tgagattggatgaagtcaactcc

SEQ ID NO: 197 - RNA, 23 nt, synthetic construct
  source 1..23: mol_type = other RNA
ttgattttatgtctcgatgagca

SEQ ID NO: 198 - RNA, 23 nt, synthetic construct
  source 1..23: mol_type = other RNA
tactgtcttatctttgaggtaga

SEQ ID NO: 199 - RNA, 23 nt, synthetic construct
  source 1..23: mol_type = other RNA
tataaaaacttaatgactataac

SEQ ID NO: 200 - RNA, 23 nt, synthetic construct
  source 1..23: mol_type = other RNA
tactgtactgtcttatctttgag

SEQ ID NO: 201 - RNA, 23 nt, synthetic construct
  source 1..23: mol_type = other RNA
tttttcactaagatattctttga

SEQ ID NO: 202 - RNA, 23 nt, synthetic construct
  source 1..23: mol_type = other RNA
tgtcataataaggcaattggtac

SEQ ID NO: 203 - RNA, 23 nt, synthetic construct
  source 1..23: mol_type = other RNA
ttctttgaggtagaacaaaaaaa

SEQ ID NO: 204 - RNA, 23 nt, synthetic construct
  source 1..23: mol_type = other RNA
tacataaaggggaaaatggaaaa

SEQ ID NO: 205 - RNA, 23 nt, synthetic construct
  source 1..23: mol_type = other RNA
tctgtcttatctttgaggtagaa

SEQ ID NO: 206 - RNA, 23 nt, synthetic construct
  source 1..23: mol_type = other RNA
tcactaagatattctttgatttt

SEQ ID NO: 207 - RNA, 23 nt, synthetic construct
  source 1..23: mol_type = other RNA
tttcattgtatcatcaagcattt

SEQ ID NO: 208 - RNA, 23 nt, synthetic construct
  source 1..23: mol_type = other RNA
taacatagattgcatcacctaaa

SEQ ID NO: 209 - RNA, 23 nt, synthetic construct
  source 1..23: mol_type = other RNA
tttgacacaaagttgagatatag

SEQ ID NO: 210 - RNA, 23 nt, synthetic construct
  source 1..23: mol_type = other RNA
ttcaaagatattcacattcattg

SEQ ID NO: 211 - RNA, 23 nt, synthetic construct
  source 1..23: mol_type = other RNA
ttagatgtcagctcgtttgaagg

SEQ ID NO: 212 - RNA, 23 nt, synthetic construct
  source 1..23: mol_type = other RNA
tttagagcaatatttatttttaa

SEQ ID NO: 213 - RNA, 23 nt, synthetic construct
  source 1..23: mol_type = other RNA
tggaaaagaaagctatgagagat

SEQ ID NO: 214 - RNA, 23 nt, synthetic construct
  source 1..23: mol_type = other RNA
tacctttctcatttcctctatcg

SEQ ID NO: 215 - RNA, 23 nt, synthetic construct
  source 1..23: mol_type = other RNA
tcaagtttcacactttttcacta

SEQ ID NO: 216 - RNA, 23 nt, synthetic construct
  source 1..23: mol_type = other RNA
taccagccaaagttgagtccaag

SEQ ID NO: 217 - RNA, 23 nt, synthetic construct
  source 1..23: mol_type = other RNA
tcaagtaaaataaaaacttaatg

SEQ ID NO: 218 - RNA, 23 nt, synthetic construct
  source 1..23: mol_type = other RNA
tattttcacagccacatcttccc

SEQ ID NO: 219 - RNA, 23 nt, synthetic construct
  source 1..23: mol_type = other RNA
tagagatttctttttaacataat

SEQ ID NO: 220 - RNA, 23 nt, synthetic construct
  source 1..23: mol_type = other RNA
ttaacataattatcatcattagg

SEQ ID NO: 221 - RNA, 23 nt, synthetic construct
  source 1..23: mol_type = other RNA
tttctttttaacataattatcat

SEQ ID NO: 222 - RNA, 23 nt, synthetic construct
  source 1..23: mol_type = other RNA
tcatcattaggctttgcagtctt

SEQ ID NO: 223 - RNA, 23 nt, synthetic construct
  source 1..23: mol_type = other RNA
tagtaaaataaaaacttaatgac

SEQ ID NO: 224 - RNA, 23 nt, synthetic construct
  source 1..23: mol_type = other RNA
tttcttaatacgaagagcagtta

SEQ ID NO: 225 - RNA, 23 nt, synthetic construct
  source 1..23: mol_type = other RNA
tgagatttctttttaacataatt

SEQ ID NO: 226 - RNA, 23 nt, synthetic construct
  source 1..23: mol_type = other RNA
tagagattggatgaagtcaactc

SEQ ID NO: 227 - RNA, 23 nt, synthetic construct
  source 1..23: mol_type = other RNA
tgtatcatcaagcatttcaggag

SEQ ID NO: 228 - RNA, 23 nt, synthetic construct
  source 1..23: mol_type = other RNA
tattgtatcatcaagcatttcag

SEQ ID NO: 229 - RNA, 23 nt, synthetic construct
  source 1..23: mol_type = other RNA
tttcaaatagtcatataaggagc

SEQ ID NO: 230 - RNA, 21 nt, synthetic construct
  source 1..21: mol_type = other RNA
  modified_base 1: mod_base = OTHER; note = 2'-O-methyluridine with a 3'-phosphorothioate linkage
  modified_base 2: mod_base = OTHER; note = 2'-O-methyluridine with a 3'-phosphorothioate linkage
  modified_base 3: mod_base = um
  modified_base 4: mod_base = um
  modified_base 5: mod_base = OTHER; note = 2'-O-methyladenosine
  modified_base 6: mod_base = um
  modified_base 7: mod_base = um
  modified_base 8: mod_base = um
  modified_base 9: mod_base = OTHER; note = 2'-fluorouridine
  modified_base 10: mod_base = OTHER; note = 2'-fluoroadenosine
  modified_base 11: mod_base = OTHER; note = 2'-fluorocytidine
  modified_base 12: mod_base = um
  modified_base 13: mod_base = um
  modified_base 14: mod_base = gm
  modified_base 15: mod_base = OTHER; note = 2'-O-methyladenosine
  modified_base 16: mod_base = OTHER; note = 2'-O-methyladenosine
  modified_base 17: mod_base = cm
  modified_base 18: mod_base = cm
  modified_base 19: mod_base = OTHER; note = 2'-O-methyladenosine with a 3'-phosphorothioate linkage
  modified_base 20: mod_base = OTHER; note = 2'-O-methyladenosine with a 3'-phosphorothioate linkage
  modified_base 21: mod_base = OTHER; note = 2'-O-methyladenosine
ttttattttacttgaaccaaa

SEQ ID NO: 231 - RNA, 21 nt, synthetic construct
  source 1..21: mol_type = other RNA
  modified_base 1: mod_base = OTHER; note = 2'-O-methylcytidine with a 3'-phosphorothioate linkage
  modified_base 2: mod_base = OTHER; note = 2'-O-methylcytidine with a 3'-phosphorothioate linkage
  modified_base 3: mod_base = cm
  modified_base 4: mod_base = gm
  modified_base 5: mod_base = cm
  modified_base 6: mod_base = cm
  modified_base 7: mod_base = um
  modified_base 8: mod_base = OTHER; note = 2'-O-methyladenosine
  modified_base 9: mod_base = OTHER; note = 2'-fluoroadenosine
  modified_base 10: mod_base = OTHER; note = 2'-fluorocytidine
  modified_base 11: mod_base = OTHER; note = 2'-fluorouridine
  modified_base 12: mod_base = gm
  modified_base 13: mod_base = cm
  modified_base 14: mod_base = um
  modified_base 15: mod_base = cm
  modified_base 16: mod_base = um
  modified_base 17: mod_base = um
  modified_base 18: mod_base = cm
  modified_base 19: mod_base = OTHER; note = 2'-O-methylguanosine with a 3'-phosphorothioate linkage
  modified_base 20: mod_base = OTHER; note = 2'-O-methyluridine with a 3'-phosphorothioate linkage
  modified_base 21: mod_base = OTHER; note = 2'-O-methyladenosine
cccgcctaactgctcttcgta

SEQ ID NO: 232 - RNA, 21 nt, synthetic construct
  source 1..21: mol_type = other RNA
  modified_base 1: mod_base = OTHER; note = 2'-O-methylcytidine with a 3'-phosphorothioate linkage
  modified_base 2: mod_base = OTHER; note = 2'-O-methyluridine with a 3'-phosphorothioate linkage
  modified_base 3: mod_base = OTHER; note = 2'-O-methyladenosine
  modified_base 4: mod_base = OTHER; note = 2'-O-methyladenosine
  modified_base 5: mod_base = um
  modified_base 6: mod_base = gm
  modified_base 7: mod_base = OTHER; note = 2'-O-methyladenosine
  modified_base 8: mod_base = um
  modified_base 9: mod_base = OTHER; note = 2'-fluoroguanosine
  modified_base 10: mod_base = OTHER; note = 2'-fluoroadenosine
  modified_base 11: mod_base = OTHER; note = 2'-fluorouridine
  modified_base 12: mod_base = OTHER; note = 2'-O-methyladenosine
  modified_base 13: mod_base = OTHER; note = 2'-O-methyladenosine
  modified_base 14: mod_base = um
  modified_base 15: mod_base = um
  modified_base 16: mod_base = OTHER; note = 2'-O-methyladenosine
  modified_base 17: mod_base = um
  modified_base 18: mod_base = gm
  modified_base 19: mod_base = OTHER; note = 2'-O-methyluridine with a 3'-phosphorothioate linkage
  modified_base 20: mod_base = OTHER; note = 2'-O-methyluridine with a 3'-phosphorothioate linkage
  modified_base 21: mod_base = OTHER; note = 2'-O-methyladenosine
ctaatgatgataattatgtta

SEQ ID NO: 233 - RNA, 21 nt, synthetic construct
  source 1..21: mol_type = other RNA
  modified_base 1: mod_base = OTHER; note = 2'-O-methyladenosine with a 3'-phosphorothioate linkage
  modified_base 2: mod_base = OTHER; note = 2'-O-methyladenosine with a 3'-phosphorothioate linkage
  modified_base 3: mod_base = gm
  modified_base 4: mod_base = um
  modified_base 5: mod_base = OTHER; note = 2'-O-methyladenosine
  modified_base 6: mod_base = um
  modified_base 7: mod_base = OTHER; note = 2'-O-methyladenosine
  modified_base 8: mod_base = OTHER; note = 2'-O-methyladenosine
  modified_base 9: mod_base = OTHER; note = 2'-fluoroadenosine
  modified_base 10: mod_base = OTHER; note = 2'-fluoroadenosine
  modified_base 11: mod_base = OTHER; note = 2'-fluorouridine
  modified_base 12: mod_base = OTHER; note = 2'-O-methyladenosine
  modified_base 13: mod_base = OTHER; note = 2'-O-methyladenosine
  modified_base 14: mod_base = gm
  modified_base 15: mod_base = cm
  modified_base 16: mod_base = um
  modified_base 17: mod_base = cm
  modified_base 18: mod_base = um
  modified_base 19: mod_base = OTHER; note = 2'-O-methyladenosine with a 3'-phosphorothioate linkage
  modified_base 20: mod_base = OTHER; note = 2'-O-methyluridine with a 3'-phosphorothioate linkage
  modified_base 21: mod_base = OTHER; note = 2'-O-methyladenosine
aagtataaaataagctctata

SEQ ID NO: 234 - RNA, 21 nt, synthetic construct
  source 1..21: mol_type = other RNA
  modified_base 1: mod_base = OTHER; note = 2'-O-methyluridine with a 3'-phosphorothioate linkage
  modified_base 2: mod_base = OTHER; note = 2'-O-methylcytidine with a 3'-phosphorothioate linkage
  modified_base 3: mod_base = cm
  modified_base 4: mod_base = OTHER; note = 2'-O-methyladenosine
  modified_base 5: mod_base = um
  modified_base 6: mod_base = um
  modified_base 7: mod_base = um
  modified_base 8: mod_base = um
  modified_base 9: mod_base = OTHER; note = 2'-fluorocytidine
  modified_base 10: mod_base = OTHER; note = 2'-fluorocytidine
  modified_base 11: mod_base = OTHER; note = 2'-fluorocytidine
  modified_base 12: mod_base = cm
  modified_base 13: mod_base = um
  modified_base 14: mod_base = um
  modified_base 15: mod_base = um
  modified_base 16: mod_base = OTHER; note = 2'-O-methyladenosine
  modified_base 17: mod_base = um
  modified_base 18: mod_base = gm
  modified_base 19: mod_base = OTHER; note = 2'-O-methyluridine with a 3'-phosphorothioate linkage
  modified_base 20: mod_base = OTHER; note = 2'-O-methylguanosine with a 3'-phosphorothioate linkage
  modified_base 21: mod_base = OTHER; note = 2'-O-methyladenosine
tccattttcccctttatgtga

SEQ ID NO: 235 - RNA, 21 nt, synthetic construct
  source 1..21: mol_type = other RNA
  modified_base 1: mod_base = OTHER; note = 2'-O-methyladenosine with a 3'-phosphorothioate linkage
  modified_base 2: mod_base = OTHER; note = 2'-O-methyluridine with a 3'-phosphorothioate linkage
  modified_base 3: mod_base = gm
  modified_base 4: mod_base = um
  modified_base 5: mod_base = um
  modified_base 6: mod_base = OTHER; note = 2'-O-methyladenosine
  modified_base 7: mod_base = OTHER; note = 2'-O-methyladenosine
  modified_base 8: mod_base = OTHER; note = 2'-O-methyladenosine
  modified_base 9: mod_base = OTHER; note = 2'-fluoroadenosine
  modified_base 10: mod_base = OTHER; note = 2'-fluoroadenosine
  modified_base 11: mod_base = OTHER; note = 2'-fluoroguanosine
  modified_base 12: mod_base = OTHER; note = 2'-O-methyladenosine
  modified_base 13: mod_base = OTHER; note = 2'-O-methyladenosine
  modified_base 14: mod_base = OTHER; note = 2'-O-methyladenosine
  modified_base 15: mod_base = um
  modified_base 16: mod_base = cm
  modified_base 17: mod_base = um
  modified_base 18: mod_base = cm
  modified_base 19: mod_base = OTHER; note = 2'-O-methyluridine with a 3'-phosphorothioate linkage
  modified_base 20: mod_base = OTHER; note = 2'-O-methylcytidine with a 3'-phosphorothioate linkage
  modified_base 21: mod_base = OTHER; note = 2'-O-methyladenosine
atgttaaaaagaaatctctca

SEQ ID NO: 236 - RNA, 21 nt, synthetic construct
  source 1..21: mol_type = other RNA
  modified_base 1: mod_base = OTHER; note = 2'-O-methyladenosine with a 3'-phosphorothioate linkage
  modified_base 2: mod_base = OTHER; note = 2'-O-methyluridine with a 3'-phosphorothioate linkage
  modified_base 3: mod_base = OTHER; note = 2'-O-methyladenosine
  modified_base 4: mod_base = OTHER; note = 2'-O-methyladenosine
  modified_base 5: mod_base = gm
  modified_base 6: mod_base = OTHER; note = 2'-O-methyladenosine
  modified_base 7: mod_base = cm
  modified_base 8: mod_base = OTHER; note = 2'-O-methyladenosine
  modified_base 9: mod_base = OTHER; note = 2'-fluoroguanosine
  modified_base 10: mod_base = OTHER; note = 2'-fluorouridine
  modified_base 11: mod_base = OTHER; note = 2'-fluoroadenosine
  modified_base 12: mod_base = cm
  modified_base 13: mod_base = OTHER; note = 2'-O-methyladenosine
  modified_base 14: mod_base = gm
  modified_base 15: mod_base = um
  modified_base 16: mod_base = OTHER; note = 2'-O-methyladenosine
  modified_base 17: mod_base = um
  modified_base 18: mod_base = um
  modified_base 19: mod_base = OTHER; note = 2'-O-methyluridine with a 3'-phosphorothioate linkage
  modified_base 20: mod_base = OTHER; note = 2'-O-methyladenosine with a 3'-phosphorothioate linkage
  modified_base 21: mod_base = OTHER; note = 2'-O-methyladenosine
ataagacagtacagtatttaa

SEQ ID NO: 237 - RNA, 21 nt, synthetic construct
  source 1..21: mol_type = other RNA
  modified_base 1: mod_base = OTHER; note = 2'-O-methyladenosine with a 3'-phosphorothioate linkage
  modified_base 2: mod_base = OTHER; note = 2'-O-methyladenosine with a 3'-phosphorothioate linkage
  modified_base 3: mod_base = cm
  modified_base 4: mod_base = um
  modified_base 5: mod_base = cm
  modified_base 6: mod_base = um
  modified_base 7: mod_base = OTHER; note = 2'-O-methyladenosine
  modified_base 8: mod_base = OTHER; note = 2'-O-methyladenosine
  modified_base 9: mod_base = OTHER; note = 2'-fluoroadenosine
  modified_base 10: mod_base = OTHER; note = 2'-fluoroguanosine
  modified_base 11: mod_base = OTHER; note = 2'-fluorouridine
  modified_base 12: mod_base = um
  modified_base 13: mod_base = OTHER; note = 2'-O-methyladenosine
  modified_base 14: mod_base = OTHER; note = 2'-O-methyladenosine
  modified_base 15: mod_base = gm
  modified_base 16: mod_base = cm
  modified_base 17: mod_base = OTHER; note = 2'-O-methyladenosine
  modified_base 18: mod_base = um
  modified_base 19: mod_base = OTHER; note = 2'-O-methylguanosine with a 3'-phosphorothioate linkage
  modified_base 20: mod_base = OTHER; note = 2'-O-methylguanosine with a 3'-phosphorothioate linkage
  modified_base 21: mod_base = OTHER; note = 2'-O-methyladenosine
aactctaaagttaagcatgga

SEQ ID NO: 238 - RNA, 21 nt, synthetic construct
  source 1..21: mol_type = other RNA
  modified_base 1: mod_base = OTHER; note = 2'-O-methyluridine with a 3'-phosphorothioate linkage
  modified_base 2: mod_base = OTHER; note = 2'-O-methyluridine with a 3'-phosphorothioate linkage
  modified_base 3: mod_base = um
  modified_base 4: mod_base = OTHER; note = 2'-O-methyladenosine
  modified_base 5: mod_base = OTHER; note = 2'-O-methyladenosine
  modified_base 6: mod_base = um
  modified_base 7: mod_base = um
  modified_base 8: mod_base = um
  modified_base 9: mod_base = OTHER; note = 2'-fluorouridine
  modified_base 10: mod_base = OTHER; note = 2'-fluoroadenosine
  modified_base 11: mod_base = OTHER; note = 2'-fluorouridine
  modified_base 12: mod_base = um
  modified_base 13: mod_base = um
  modified_base 14: mod_base = um
  modified_base 15: mod_base = gm
  modified_base 16: mod_base = OTHER; note = 2'-O-methyladenosine
  modified_base 17: mod_base = OTHER; note = 2'-O-methyladenosine
  modified_base 18: mod_base = OTHER; note = 2'-O-methyladenosine
  modified_base 19: mod_base = OTHER; note = 2'-O-methylguanosine with a 3'-phosphorothioate linkage
  modified_base 20: mod_base = OTHER; note = 2'-O-methylcytidine with a 3'-phosphorothioate linkage
  modified_base 21: mod_base = OTHER; note = 2'-O-methyladenosine
tttaattttattttgaaagca

SEQ ID NO: 239 - RNA, 21 nt, synthetic construct
  source 1..21: mol_type = other RNA
  modified_base 1: mod_base = OTHER; note = 2'-O-methylguanosine with a 3'-phosphorothioate linkage
  modified_base 2: mod_base = OTHER; note = 2'-O-methyluridine with a 3'-phosphorothioate linkage
  modified_base 3: mod_base = um
  modified_base 4: mod_base = OTHER; note = 2'-O-methyladenosine
  modified_base 5: mod_base = um
  modified_base 6: mod_base = OTHER; note = 2'-O-methyladenosine
  modified_base 7: mod_base = gm
  modified_base 8: mod_base = um
  modified_base 9: mod_base = OTHER; note = 2'-fluorocytidine
  modified_base 10: mod_base = OTHER; note = 2'-fluoroadenosine
  modified_base 11: mod_base = OTHER; note = 2'-fluorouridine
  modified_base 12: mod_base = um
  modified_base 13: mod_base = OTHER; note = 2'-O-methyladenosine
  modified_base 14: mod_base = OTHER; note = 2'-O-methyladenosine
  modified_base 15: mod_base = gm
  modified_base 16: mod_base = um
  modified_base 17: mod_base = um
  modified_base 18: mod_base = um
  modified_base 19: mod_base = OTHER; note = 2'-O-methyluridine with a 3'-phosphorothioate linkage
  modified_base 20: mod_base = OTHER; note = 2'-O-methyluridine with a 3'-phosphorothioate linkage
  modified_base 21: mod_base = OTHER; note = 2'-O-methyladenosine
gttatagtcattaagttttta

SEQ ID NO: 240 - RNA, 21 nt, synthetic construct
  source 1..21: mol_type = other RNA
  modified_base 1: mod_base = OTHER; note = 2'-O-methyluridine with a 3'-phosphorothioate linkage
  modified_base 2: mod_base = OTHER; note = 2'-O-methyluridine with a 3'-phosphorothioate linkage
  modified_base 3: mod_base = um
  modified_base 4: mod_base = OTHER; note = 2'-O-methyladenosine
  modified_base 5: mod_base = um
  modified_base 6: mod_base = gm
  modified_base 7: mod_base = um
  modified_base 8: mod_base = gm
  modified_base 9: mod_base = OTHER; note = 2'-fluoroadenosine
  modified_base 10: mod_base = OTHER; note = 2'-fluoroadenosine
  modified_base 11: mod_base = OTHER; note = 2'-fluorouridine
  modified_base 12: mod_base = gm
  modified_base 13: mod_base = um
  modified_base 14: mod_base = um
  modified_base 15: mod_base = um
  modified_base 16: mod_base = um
  modified_base 17: mod_base = um
  modified_base 18: mod_base = gm
  modified_base 19: mod_base = OTHER; note = 2'-O-methylcytidine with a 3'-phosphorothioate linkage
  modified_base 20: mod_base = OTHER; note = 2'-O-methylcytidine with a 3'-phosphorothioate linkage
  modified_base 21: mod_base = OTHER; note = 2'-O-methyladenosine
tttatgtgaatgtttttgcca

SEQ ID NO: 241 - RNA, 21 nt, synthetic construct
  source 1..21: mol_type = other RNA
  modified_base 1: mod_base = OTHER; note = 2'-O-methyluridine with a 3'-phosphorothioate linkage
  modified_base 2: mod_base = OTHER; note = 2'-O-methyluridine with a 3'-phosphorothioate linkage
  modified_base 3: mod_base = OTHER; note = 2'-O-methyladenosine
  modified_base 4: mod_base = um
  modified_base 5: mod_base = gm
  modified_base 6: mod_base = OTHER; note = 2'-O-methyladenosine
  modified_base 7: mod_base = cm
  modified_base 8: mod_base = OTHER; note = 2'-O-methyladenosine
  modified_base 9: mod_base = OTHER; note = 2'-fluorouridine
  modified_base 10: mod_base = OTHER; note = 2'-fluoroguanosine
  modified_base 11: mod_base = OTHER; note = 2'-fluoroguanosine
  modified_base 12: mod_base = um
  modified_base 13: mod_base = gm
  modified_base 14: mod_base = cm
  modified_base 15: mod_base = cm
  modified_base 16: mod_base = um
  modified_base 17: mod_base = um
  modified_base 18: mod_base = cm
  modified_base 19: mod_base = OTHER; note = 2'-O-methyladenosine with a 3'-phosphorothioate linkage
  modified_base 20: mod_base = OTHER; note = 2'-O-methylguanosine with a 3'-phosphorothioate linkage
  modified_base 21: mod_base = OTHER; note = 2'-O-methyladenosine
ttatgacatggtgccttcaga

SEQ ID NO: 242 - RNA, 21 nt, synthetic construct
  source 1..21: mol_type = other RNA
  modified_base 1: mod_base = OTHER; note = 2'-O-methyluridine with a 3'-phosphorothioate linkage
  modified_base 2: mod_base = OTHER; note = 2'-O-methylcytidine with a 3'-phosphorothioate linkage
  modified_base 3: mod_base = OTHER; note = 2'-O-methyladenosine
  modified_base 4: mod_base = OTHER; note = 2'-O-methyladenosine
  modified_base 5: mod_base = OTHER; note = 2'-O-methyladenosine
  modified_base 6: mod_base = gm
  modified_base 7: mod_base = OTHER; note = 2'-O-methyladenosine
  modified_base 8: mod_base = OTHER; note = 2'-O-methyladenosine
  modified_base 9: mod_base = OTHER; note = 2'-fluoroguanosine
  modified_base 10: mod_base = OTHER; note = 2'-fluoroadenosine
  modified_base 11: mod_base = OTHER; note = 2'-fluorocytidine
  modified_base 12: mod_base = um
  modified_base 13: mod_base = gm
  modified_base 14: mod_base = cm
  modified_base 15: mod_base = OTHER; note = 2'-O-methyladenosine
  modified_base 16: mod_base = OTHER; note = 2'-O-methyladenosine
  modified_base 17: mod_base = OTHER; note = 2'-O-methyladenosine
  modified_base 18: mod_base = gm
  modified_base 19: mod_base = OTHER; note = 2'-O-methylcytidine with a 3'-phosphorothioate linkage
  modified_base 20: mod_base = OTHER; note = 2'-O-methylcytidine with a 3'-phosphorothioate linkage
  modified_base 21: mod_base = OTHER; note = 2'-O-methyladenosine
tcaaagaagactgcaaagcca

SEQ ID NO: 243 - RNA, 21 nt, synthetic construct
  source 1..21: mol_type = other RNA
  modified_base 1: mod_base = OTHER; note = 2'-O-methyluridine with a 3'-phosphorothioate linkage
  modified_base 2: mod_base = OTHER; note = 2'-O-methylguanosine with a 3'-phosphorothioate linkage
  modified_base 3: mod_base = OTHER; note = 2'-O-methyladenosine
  modified_base 4: mod_base = OTHER; note = 2'-O-methyladenosine
  modified_base 5: mod_base = OTHER; note = 2'-O-methyladenosine
  modified_base 6: mod_base = OTHER; note = 2'-O-methyladenosine
  modified_base 7: mod_base = gm
  modified_base 8: mod_base = OTHER; note = 2'-O-methyladenosine
  modified_base 9: mod_base = OTHER; note = 2'-fluorouridine
  modified_base 10: mod_base = OTHER; note = 2'-fluoroadenosine
  modified_base 11: mod_base = OTHER; note = 2'-fluoroadenosine
  modified_base 12: mod_base = cm
  modified_base 13: mod_base = um
  modified_base 14: mod_base = cm
  modified_base 15: mod_base = um
  modified_base 16: mod_base = OTHER; note = 2'-O-methyladenosine
  modified_base 17: mod_base = OTHER; note = 2'-O-methyladenosine
  modified_base 18: mod_base = OTHER; note = 2'-O-methyladenosine
  modified_base 19: mod_base = OTHER; note = 2'-O-methylguanosine with a 3'-phosphorothioate linkage
  modified_base 20: mod_base = OTHER; note = 2'-O-methyluridine with a 3'-phosphorothioate linkage
  modified_base 21: mod_base = OTHER; note = 2'-O-methyladenosine
tgaaaagataactctaaagta

SEQ ID NO: 244 - RNA, 21 nt, synthetic construct
  source 1..21: mol_type = other RNA
  modified_base 1: mod_base = OTHER; note = 2'-O-methyluridine with a 3'-phosphorothioate linkage
  modified_base 2: mod_base = OTHER; note = 2'-O-methyluridine with a 3'-phosphorothioate linkage
  modified_base 3: mod_base = um
  modified_base 4: mod_base = OTHER; note = 2'-O-methyladenosine
  modified_base 5: mod_base = cm
  modified_base 6: mod_base = um
  modified_base 7: mod_base = um
  modified_base 8: mod_base = gm
  modified_base 9: mod_base = OTHER; note = 2'-fluoroadenosine
  modified_base 10: mod_base = OTHER; note = 2'-fluoroadenosine
  modified_base 11: mod_base = OTHER; note = 2'-fluorocytidine
  modified_base 12: mod_base = cm
  modified_base 13: mod_base = OTHER; note = 2'-O-methyladenosine
  modified_base 14: mod_base = OTHER; note = 2'-O-methyladenosine
  modified_base 15: mod_base = gm
  modified_base 16: mod_base = OTHER; note = 2'-O-methyladenosine
  modified_base 17: mod_base = gm
  modified_base 18: mod_base = cm
  modified_base 19: mod_base = OTHER; note = 2'-O-methyladenosine with a 3'-phosphorothioate linkage
  modified_base 20: mod_base = OTHER; note = 2'-O-methylcytidine with a 3'-phosphorothioate linkage
  modified_base 21: mod_base = OTHER; note = 2'-O-methyladenosine
tttacttgaaccaagagcaca

SEQ ID NO: 245 - RNA, 21 nt, synthetic construct
  source 1..21: mol_type = other RNA
  modified_base 1: mod_base = OTHER; note = 2'-O-methylcytidine with a 3'-phosphorothioate linkage
  modified_base 2: mod_base = OTHER; note = 2'-O-methyladenosine with a 3'-phosphorothioate linkage
  modified_base 3: mod_base = OTHER; note = 2'-O-methyladenosine
  modified_base 4: mod_base = cm
  modified_base 5: mod_base = um
  modified_base 6: mod_base = cm
  modified_base 7: mod_base = OTHER; note = 2'-O-methyladenosine
  modified_base 8: mod_base = um
  modified_base 9: mod_base = OTHER; note = 2'-fluorocytidine
  modified_base 10: mod_base = OTHER; note = 2'-fluorouridine
  modified_base 11: mod_base = OTHER; note = 2'-fluorouridine
  modified_base 12: mod_base = um
  modified_base 13: mod_base = um
  modified_base 14: mod_base = um
  modified_base 15: mod_base = OTHER; note = 2'-O-methyladenosine
  modified_base 16: mod_base = um
  modified_base 17: mod_base = um
  modified_base 18: mod_base = um
  modified_base 19: mod_base = OTHER; note = 2'-O-methyladenosine with a 3'-phosphorothioate linkage
  modified_base 20: mod_base = OTHER; note = 2'-O-methyladenosine with a 3'-phosphorothioate linkage
  modified_base 21: mod_base = OTHER; note = 2'-O-methyladenosine
caactcatctttttatttaaa

SEQ ID NO: 246 - RNA, 21 nt, synthetic construct
  source 1..21: mol_type = other RNA
  modified_base 1: mod_base = OTHER; note = 2'-O-methyladenosine with a 3'-phosphorothioate linkage
  modified_base 2: mod_base = OTHER; note = 2'-O-methyluridine with a 3'-phosphorothioate linkage
  modified_base 3: mod_base = gm
  modified_base 4: mod_base = OTHER; note = 2'-O-methyladenosine
  modified_base 5: mod_base = um
  modified_base 6: mod_base = gm
  modified_base 7: mod_base = OTHER; note = 2'-O-methyladenosine
  modified_base 8: mod_base = um
  modified_base 9: mod_base = OTHER; note = 2'-fluoroadenosine
  modified_base 10: mod_base = OTHER; note = 2'-fluoroadenosine
  modified_base 11: mod_base = OTHER; note = 2'-fluorouridine
  modified_base 12: mod_base = um
  modified_base 13: mod_base = OTHER; note = 2'-O-methyladenosine
  modified_base 14: mod_base = um
  modified_base 15: mod_base = gm
  modified_base 16: mod_base = um
  modified_base 17: mod_base = um
  modified_base 18: mod_base = OTHER; note = 2'-O-methyladenosine
  modified_base 19: mod_base = OTHER; note = 2'-O-methyladenosine with a 3'-phosphorothioate linkage
  modified_base 20: mod_base = OTHER; note = 2'-O-methyladenosine with a 3'-phosphorothioate linkage
  modified_base 21: mod_base = OTHER; note = 2'-O-methyladenosine
atgatgataattatgttaaaa

SEQ ID NO: 247 - RNA, 21 nt, synthetic construct
  source 1..21: mol_type = other RNA
  modified_base 1: mod_base = OTHER; note = 2'-O-methyluridine with a 3'-phosphorothioate linkage
  modified_base 2: mod_base = OTHER; note = 2'-O-methyladenosine with a 3'-phosphorothioate linkage
  modified_base 3: mod_base = um
  modified_base 4: mod_base = OTHER; note = 2'-O-methyladenosine
  modified_base 5: mod_base = um
  modified_base 6: mod_base = um
  modified_base 7: mod_base = OTHER; note = 2'-O-methyladenosine
  modified_base 8: mod_base = cm
  modified_base 9: mod_base = OTHER; note = 2'-fluoroadenosine
  modified_base 10: mod_base = OTHER; note = 2'-fluoroadenosine
  modified_base 11: mod_base = OTHER; note = 2'-fluoroadenosine
  modified_base 12: mod_base = OTHER; note = 2'-O-methyladenosine
  modified_base 13: mod_base = gm
  modified_base 14: mod_base = um
  modified_base 15: mod_base = OTHER; note = 2'-O-methyladenosine
  modified_base 16: mod_base = um
  modified_base 17: mod_base = OTHER; note = 2'-O-methyladenosine
  modified_base 18: mod_base = OTHER; note = 2'-O-methyladenosine
  modified_base 19: mod_base = OTHER; note = 2'-O-methyladenosine with a 3'-phosphorothioate linkage
  modified_base 20: mod_base = OTHER; note = 2'-O-methyladenosine with a 3'-phosphorothioate linkage
  modified_base 21: mod_base = OTHER; note = 2'-O-methyladenosine
tatattacaaaagtataaaaa

SEQ ID NO: 248 - RNA, 21 nt, synthetic construct
  source 1..21: mol_type = other RNA
  modified_base 1: mod_base = OTHER; note = 2'-O-methylguanosine with a 3'-phosphorothioate linkage
  modified_base 2: mod_base = OTHER; note = 2'-O-methyluridine with a 3'-phosphorothioate linkage
  modified_base 3: mod_base = gm
  modified_base 4: mod_base = OTHER; note = 2'-O-methyladenosine
  modified_base 5: mod_base = um
  modified_base 6: mod_base = OTHER; note = 2'-O-methyladenosine
  modified_base 7: mod_base = gm
  modified_base 8: mod_base = um
  modified_base 9: mod_base = OTHER; note = 2'-fluoroadenosine
  modified_base 10: mod_base = OTHER; note = 2'-fluorocytidine
  modified_base 11: mod_base = OTHER; note = 2'-fluoroadenosine
  modified_base 12: mod_base = um
  modified_base 13: mod_base = gm
  modified_base 14: mod_base = um
  modified_base 15: mod_base = um
  modified_base 16: mod_base = OTHER; note = 2'-O-methyladenosine
  modified_base 17: mod_base = gm
  modified_base 18: mod_base = cm
  modified_base 19: mod_base = OTHER; note = 2'-O-methyladenosine with a 3'-phosphorothioate linkage
  modified_base 20: mod_base = OTHER; note = 2'-O-methyluridine with a 3'-phosphorothioate linkage
  modified_base 21: mod_base = OTHER; note = 2'-O-methyladenosine
gtgatagtacatgttagcata

SEQ ID NO: 249 - RNA, 21 nt, synthetic construct
  source 1..21: mol_type = other RNA
  modified_base 1: mod_base = OTHER; note = 2'-O-methyluridine with a 3'-phosphorothioate linkage
  modified_base 2: mod_base = OTHER; note = 2'-O-methyluridine with a 3'-phosphorothioate linkage
  modified_base 3: mod_base = gm
  modified_base 4: mod_base = cm
  modified_base 5: mod_base = cm
  modified_base 6: mod_base = um
  modified_base 7: mod_base = um
  modified_base 8: mod_base = OTHER; note = 2'-O-methyladenosine
  modified_base 9: mod_base = OTHER; note = 2'-fluorouridine
  modified_base 10: mod_base = OTHER; note = 2'-fluorouridine
  modified_base 11: mod_base = OTHER; note = 2'-fluoroadenosine
  modified_base 12: mod_base = um
  modified_base 13: mod_base = gm
  modified_base 14: mod_base = OTHER; note = 2'-O-methyladenosine
  modified_base 15: mod_base = cm
  modified_base 16: mod_base = OTHER; note = 2'-O-methyladenosine
  modified_base 17: mod_base = um
  modified_base 18: mod_base = gm
  modified_base 19: mod_base = OTHER; note = 2'-O-methylguanosine with a 3'-phosphorothioate linkage
  modified_base 20: mod_base = OTHER; note = 2'-O-methyluridine with a 3'-phosphorothioate linkage
  modified_base 21: mod_base = OTHER; note = 2'-O-methyladenosine
ttgccttattatgacatggta

SEQ ID NO: 250 - RNA, 21 nt, synthetic construct
  source 1..21: mol_type = other RNA
  modified_base 1: mod_base = OTHER; note = 2'-O-methyluridine with a 3'-phosphorothioate linkage
  modified_base 2: mod_base = OTHER; note = 2'-O-methyladenosine with a 3'-phosphorothioate linkage
  modified_base 3: mod_base = gm
  modified_base 4: mod_base = cm
  modified_base 5: mod_base = OTHER; note = 2'-O-methyladenosine
  modified_base 6: mod_base = um
  modified_base 7: mod_base = OTHER; note = 2'-O-methyladenosine
  modified_base 8: mod_base = um
  modified_base 9: mod_base = OTHER; note = 2'-fluoroadenosine
  modified_base 10: mod_base = OTHER; note = 2'-fluoroadenosine
  modified_base 11: mod_base = OTHER; note = 2'-fluorouridine
  modified_base 12: mod_base = gm
  modified_base 13: mod_base = um
  modified_base 14: mod_base = OTHER; note = 2'-O-methyladenosine
  modified_base 15: mod_base = um
  modified_base 16: mod_base = um
  modified_base 17: mod_base = um
  modified_base 18: mod_base = um
  modified_base 19: mod_base = OTHER; note = 2'-O-methylguanosine with a 3'-phosphorothioate linkage
  modified_base 20: mod_base = OTHER; note = 2'-O-methyladenosine with a 3'-phosphorothioate linkage
  modified_base 21: mod_base = OTHER; note = 2'-O-methyladenosine
tagcatataatgtattttgaa

SEQ ID NO: 251 - RNA, 21 nt, synthetic construct
  source 1..21: mol_type = other RNA
  modified_base 1: mod_base = OTHER; note = 2'-O-methyladenosine with a 3'-phosphorothioate linkage
  modified_base 2: mod_base = OTHER; note = 2'-O-methylcytidine with a 3'-phosphorothioate linkage
  modified_base 3: mod_base = um
  modified_base 4: mod_base = um
  modified_base 5: mod_base = cm
  modified_base 6: mod_base = um
  modified_base 7: mod_base = gm
  modified_base 8: mod_base = um
  modified_base 9: mod_base = OTHER; note = 2'-fluoroadenosine
  modified_base 10: mod_base = OTHER; note = 2'-fluorouridine
  modified_base 11: mod_base = OTHER; note = 2'-fluorouridine
  modified_base 12: mod_base = um
  modified_base 13: mod_base = um
  modified_base 14: mod_base = cm
  modified_base 15: mod_base = um
  modified_base 16: mod_base = cm
  modified_base 17: mod_base = OTHER; note = 2'-O-methyladenosine
  modified_base 18: mod_base = um
  modified_base 19: mod_base = OTHER; note = 2'-O-methyladenosine with a 3'-phosphorothioate linkage
  modified_base 20: mod_base = OTHER; note = 2'-O-methylguanosine with a 3'-phosphorothioate linkage
  modified_base 21: mod_base = OTHER; note = 2'-O-methyladenosine
acttctgtattttctcataga

SEQ ID NO: 252 - RNA, 21 nt, synthetic construct
  source 1..21: mol_type = other RNA
  modified_base 1: mod_base = OTHER; note = 2'-O-methyluridine with a 3'-phosphorothioate linkage
  modified_base 2: mod_base = OTHER; note = 2'-O-methyluridine with a 3'-phosphorothioate linkage
  modified_base 3: mod_base = um
  modified_base 4: mod_base = um
  modified_base 5: mod_base = gm
  modified_base 6: mod_base = um
  modified_base 7: mod_base = gm
  modified_base 8: mod_base = um
  modified_base 9: mod_base = OTHER; note = 2'-fluoroguanosine
  modified_base 10: mod_base = OTHER; note = 2'-fluoroadenosine
  modified_base 11: mod_base = OTHER; note = 2'-fluorouridine
  modified_base 12: mod_base = um
  modified_base 13: mod_base = cm
  modified_base 14: mod_base = um
  modified_base 15: mod_base = um
  modified_base 16: mod_base = cm
  modified_base 17: mod_base = OTHER; note = 2'-O-methyladenosine
  modified_base 18: mod_base = OTHER; note = 2'-O-methyladenosine
  modified_base 19: mod_base = OTHER; note = 2'-O-methyladenosine with a 3'-phosphorothioate linkage
  modified_base 20: mod_base = OTHER; note = 2'-O-methylcytidine with a 3'-phosphorothioate linkage
  modified_base 21: mod_base = OTHER; note = 2'-O-methyladenosine
ttttgtgtgattcttcaaaca

SEQ ID NO: 253 - RNA, 21 nt, synthetic construct
  source 1..21: mol_type = other RNA
  modified_base 1: mod_base = OTHER; note = 2'-O-methyluridine with a 3'-phosphorothioate linkage
  modified_base 2: mod_base = OTHER; note = 2'-O-methylcytidine with a 3'-phosphorothioate linkage
  modified_base 3: mod_base = um
  modified_base 4: mod_base = OTHER; note = 2'-O-methyladenosine
  modified_base 5: mod_base = OTHER; note = 2'-O-methyladenosine
  modified_base 6: mod_base = OTHER; note = 2'-O-methyladenosine
  modified_base 7: mod_base = gm
  modified_base 8: mod_base = um
  modified_base 9: mod_base = OTHER; note = 2'-fluorouridine
  modified_base 10: mod_base = OTHER; note = 2'-fluoroadenosine
  modified_base 11: mod_base = OTHER; note = 2'-fluoroadenosine
  modified_base 12: mod_base = gm
  modified_base 13: mod_base = cm
  modified_base 14: mod_base = OTHER; note = 2'-O-methyladenosine
  modified_base 15: mod_base = um
  modified_base 16: mod_base = gm
  modified_base 17: mod_base = gm
  modified_base 18: mod_base = gm
  modified_base 19: mod_base = OTHER; note = 2'-O-methylcytidine with a 3'-phosphorothioate linkage
  modified_base 20: mod_base = OTHER; note = 2'-O-methyladenosine with a 3'-phosphorothioate linkage
  modified_base 21: mod_base = OTHER; note = 2'-O-methyladenosine
tctaaagttaagcatgggcaa

SEQ ID NO: 254 - RNA, 21 nt, synthetic construct
  source 1..21: mol_type = other RNA
  modified_base 1: mod_base = OTHER; note = 2'-O-methylguanosine with a 3'-phosphorothioate linkage
  modified_base 2: mod_base = OTHER; note = 2'-O-methyladenosine with a 3'-phosphorothioate linkage
  modified_base 3: mod_base = cm
  modified_base 4: mod_base = OTHER; note = 2'-O-methyladenosine
  modified_base 5: mod_base = um
  modified_base 6: mod_base = gm
  modified_base 7: mod_base = gm
  modified_base 8: mod_base = um
  modified_base 9: mod_base = OTHER; note = 2'-fluoroguanosine
  modified_base 10: mod_base = OTHER; note = 2'-fluorocytidine
  modified_base 11: mod_base = OTHER; note = 2'-fluorocytidine
  modified_base 12: mod_base = um
  modified_base 13: mod_base = um
  modified_base 14: mod_base = cm
  modified_base 15: mod_base = OTHER; note = 2'-O-methyladenosine
  modified_base 16: mod_base = gm
  modified_base 17: mod_base = OTHER; note = 2'-O-methyladenosine
  modified_base 18: mod_base = um
  modified_base 19: mod_base = OTHER; note = 2'-O-methylcytidine with a 3'-phosphorothioate linkage
  modified_base 20: mod_base = OTHER; note = 2'-O-methylcytidine with a 3'-phosphorothioate linkage
  modified_base 21: mod_base = OTHER; note = 2'-O-methyladenosine
gacatggtgccttcagatcca

SEQ ID NO: 255 - RNA, 21 nt, synthetic construct
  source 1..21: mol_type = other RNA
  modified_base 1: mod_base = OTHER; note = 2'-O-methylguanosine with a 3'-phosphorothioate linkage
  modified_base 2: mod_base = OTHER; note = 2'-O-methylcytidine with a 3'-phosphorothioate linkage
  modified_base 3: mod_base = cm
  modified_base 4: mod_base = cm
  modified_base 5: mod_base = gm
  modified_base 6: mod_base = cm
  modified_base 7: mod_base = cm
  modified_base 8: mod_base = um
  modified_base 9: mod_base = OTHER; note = 2'-fluoroadenosine
  modified_base 10: mod_base = OTHER; note = 2'-fluoroadenosine
  modified_base 11: mod_base = OTHER; note = 2'-fluorocytidine
  modified_base 12: mod_base = um
  modified_base 13: mod_base = gm
  modified_base 14: mod_base = cm
  modified_base 15: mod_base = um
  modified_base 16: mod_base = cm
  modified_base 17: mod_base = um
  modified_base 18: mod_base = um
  modified_base 19: mod_base = OTHER; note = 2'-O-methylcytidine with a 3'-phosphorothioate linkage
  modified_base 20: mod_base = OTHER; note = 2'-O-methylguanosine with a 3'-phosphorothioate linkage
  modified_base 21: mod_base = OTHER; note = 2'-O-methyladenosine
gcccgcctaactgctcttcga

SEQ ID NO: 256 - RNA, 21 nt, synthetic construct
  source 1..21: mol_type = other RNA
  modified_base 1: mod_base = OTHER; note = 2'-O-methyluridine with a 3'-phosphorothioate linkage
  modified_base 2: mod_base = OTHER; note = 2'-O-methylcytidine with a 3'-phosphorothioate linkage
  modified_base 3: mod_base = OTHER; note = 2'-O-methyladenosine
  modified_base 4: mod_base = OTHER; note = 2'-O-methyladenosine
  modified_base 5: mod_base = OTHER; note = 2'-O-methyladenosine
  modified_base 6: mod_base = gm
  modified_base 7: mod_base = OTHER; note = 2'-O-methyladenosine
  modified_base 8: mod_base = OTHER; note = 2'-O-methyladenosine
  modified_base 9: mod_base = OTHER; note = 2'-fluorouridine
  modified_base 10: mod_base = OTHER; note = 2'-fluoroadenosine
  modified_base 11: mod_base = OTHER; note = 2'-fluorouridine
  modified_base 12: mod_base = cm
  modified_base 13: mod_base = um
  modified_base 14: mod_base = um
  modified_base 15: mod_base = OTHER; note = 2'-O-methyladenosine
  modified_base 16: mod_base = gm
  modified_base 17: mod_base = um
  modified_base 18: mod_base = gm
  modified_base 19: mod_base = OTHER; note = 2'-O-methyladenosine with a 3'-phosphorothioate linkage
  modified_base 20: mod_base = OTHER; note = 2'-O-methyladenosine with a 3'-phosphorothioate linkage
  modified_base 21: mod_base = OTHER; note = 2'-O-methyladenosine
tcaaagaatatcttagtgaaa

SEQ ID NO: 257 - RNA, 21 nt, synthetic construct
  source 1..21: mol_type = other RNA
  modified_base 1: mod_base = OTHER; note = 2'-O-methylguanosine with a 3'-phosphorothioate linkage
  modified_base 2: mod_base = OTHER; note = 2'-O-methyluridine with a 3'-phosphorothioate linkage
  modified_base 3: mod_base = OTHER; note = 2'-O-methyladenosine
  modified_base 4: mod_base = um
  modified_base 5: mod_base = cm
  modified_base 6: mod_base = cm
  modified_base 7: mod_base = cm
  modified_base 8: mod_base = OTHER; note = 2'-O-methyladenosine
  modified_base 9: mod_base = OTHER; note = 2'-fluoroadenosine
  modified_base 10: mod_base = OTHER; note = 2'-fluoroadenosine
  modified_base 11: mod_base = OTHER; note = 2'-fluorocytidine
  modified_base 12: mod_base = cm
  modified_base 13: mod_base = OTHER; note = 2'-O-methyladenosine
  modified_base 14: mod_base = gm
  modified_base 15: mod_base = um
  modified_base 16: mod_base = gm
  modified_base 17: mod_base = gm
  modified_base 18: mod_base = cm
  modified_base 19: mod_base = OTHER; note = 2'-O-methyladenosine with a 3'-phosphorothioate linkage
  modified_base 20: mod_base = OTHER; note = 2'-O-methyladenosine with a 3'-phosphorothioate linkage
  modified_base 21: mod_base = OTHER; note = 2'-O-methyladenosine
gtatcccaaaccagtggcaaa

SEQ ID NO: 258 - RNA, 21 nt, synthetic construct
  source 1..21: mol_type = other RNA
  modified_base 1: mod_base = OTHER; note = 2'-O-methyluridine with a 3'-phosphorothioate linkage
  modified_base 2: mod_base = OTHER; note = 2'-O-methyluridine with a 3'-phosphorothioate linkage
  modified_base 3: mod_base = um
  modified_base 4: mod_base = um
  modified_base 5: mod_base = OTHER; note = 2'-O-methyladenosine
  modified_base 6: mod_base = um
  modified_base 7: mod_base = um
  modified_base 8: mod_base = OTHER; note = 2'-O-methyladenosine
  modified_base 9: mod_base = OTHER; note = 2'-fluorouridine
  modified_base 10: mod_base = OTHER; note = 2'-fluoroguanosine
  modified_base 11: mod_base = OTHER; note = 2'-fluoroadenosine
  modified_base 12: mod_base = um
  modified_base 13: mod_base = OTHER; note = 2'-O-methyladenosine
  modified_base 14: mod_base = um
  modified_base 15: mod_base = um
  modified_base 16: mod_base = um
  modified_base 17: mod_base = gm
  modified_base 18: mod_base = um
  modified_base 19: mod_base = OTHER; note = 2'-O-methylguanosine with a 3'-phosphorothioate linkage
  modified_base 20: mod_base = OTHER; note = 2'-O-methylguanosine with a 3'-phosphorothioate linkage
  modified_base 21: mod_base = OTHER; note = 2'-O-methyladenosine
ttttattatgatatttgtgga

SEQ ID NO: 259 - RNA, 21 nt, synthetic construct
  source 1..21: mol_type = other RNA
  modified_base 1: mod_base = OTHER; note = 2'-O-methyluridine with a 3'-phosphorothioate linkage
  modified_base 2: mod_base = OTHER; note = 2'-O-methyluridine with a 3'-phosphorothioate linkage
  modified_base 3: mod_base = um
  modified_base 4: mod_base = um
  modified_base 5: mod_base = um
  modified_base 6: mod_base = um
  modified_base 7: mod_base = um
  modified_base 8: mod_base = OTHER; note = 2'-O-methyladenosine
  modified_base 9: mod_base = OTHER; note = 2'-fluoroadenosine
  modified_base 10: mod_base = OTHER; note = 2'-fluoroadenosine
  modified_base 11: mod_base = OTHER; note = 2'-fluorocytidine
  modified_base 12: mod_base = um
  modified_base 13: mod_base = gm
  modified_base 14: mod_base = gm
  modified_base 15: mod_base = OTHER; note = 2'-O-methyladenosine
  modified_base 16: mod_base = um
  modified_base 17: mod_base = um
  modified_base 18: mod_base = gm
  modified_base 19: mod_base = OTHER; note = 2'-O-methylcytidine with a 3'-phosphorothioate linkage
  modified_base 20: mod_base = OTHER; note = 2'-O-methyluridine with a 3'-phosphorothioate linkage
  modified_base 21: mod_base = OTHER; note = 2'-O-methyladenosine
tttttttaaactggattgcta

SEQ ID NO: 260 - RNA, 21 nt, synthetic construct
  source 1..21: mol_type = other RNA
  modified_base 1: mod_base = OTHER; note = 2'-O-methyluridine with a 3'-phosphorothioate linkage
  modified_base 2: mod_base = OTHER; note = 2'-O-methylguanosine with a 3'-phosphorothioate linkage
  modified_base 3: mod_base = um
  modified_base 4: mod_base = cm
  modified_base 5: mod_base = um
  modified_base 6: mod_base = um
  modified_base 7: mod_base = um
  modified_base 8: mod_base = um
  modified_base 9: mod_base = OTHER; note = 2'-fluoroguanosine
  modified_base 10: mod_base = OTHER; note = 2'-fluorouridine
  modified_base 11: mod_base = OTHER; note = 2'-fluoroguanosine
  modified_base 12: mod_base = um
  modified_base 13: mod_base = gm
  modified_base 14: mod_base = OTHER; note = 2'-O-methyladenosine
  modified_base 15: mod_base = um
  modified_base 16: mod_base = um
  modified_base 17: mod_base = cm
  modified_base 18: mod_base = um
  modified_base 19: mod_base = OTHER; note = 2'-O-methyluridine with a 3'-phosphorothioate linkage
  modified_base 20: mod_base = OTHER; note = 2'-O-methylcytidine with a 3'-phosphorothioate linkage
  modified_base 21: mod_base = OTHER; note = 2'-O-methyladenosine
tgtcttttgtgtgattcttca

SEQ ID NO: 261 - RNA, 21 nt, synthetic construct
  source 1..21: mol_type = other RNA
  modified_base 1: mod_base = OTHER; note = 2'-O-methylcytidine with a 3'-phosphorothioate linkage
  modified_base 2: mod_base = OTHER; note = 2'-O-methyluridine with a 3'-phosphorothioate linkage
  modified_base 3: mod_base = cm
  modified_base 4: mod_base = um
  modified_base 5: mod_base = OTHER; note = 2'-O-methyladenosine
  modified_base 6: mod_base = OTHER; note = 2'-O-methyladenosine
  modified_base 7: mod_base = OTHER; note = 2'-O-methyladenosine
  modified_base 8: mod_base = gm
  modified_base 9: mod_base = OTHER; note = 2'-fluorouridine
  modified_base 10: mod_base = OTHER; note = 2'-fluorouridine
  modified_base 11: mod_base = OTHER; note = 2'-fluoroadenosine
  modified_base 12: mod_base = OTHER; note = 2'-O-methyladenosine
  modified_base 13: mod_base = gm
  modified_base 14: mod_base = cm
  modified_base 15: mod_base = OTHER; note = 2'-O-methyladenosine
  modified_base 16: mod_base = um
  modified_base 17: mod_base = gm
  modified_base 18: mod_base = gm
  modified_base 19: mod_base = OTHER; note = 2'-O-methylguanosine with a 3'-phosphorothioate linkage
  modified_base 20: mod_base = OTHER; note = 2'-O-methylcytidine with a 3'-phosphorothioate linkage
  modified_base 21: mod_base = OTHER; note = 2'-O-methyladenosine
ctctaaagttaagcatgggca

SEQ ID NO: 262 - RNA, 21 nt, synthetic construct
  source 1..21: mol_type = other RNA
  modified_base 1: mod_base = OTHER; note = 2'-O-methyluridine with a 3'-phosphorothioate linkage
  modified_base 2: mod_base = OTHER; note = 2'-O-methyluridine with a 3'-phosphorothioate linkage
  modified_base 3: mod_base = um
  modified_base 4: mod_base = um
  modified_base 5: mod_base = OTHER; note = 2'-O-methyladenosine
  modified_base 6: mod_base = cm
  modified_base 7: mod_base = um
  modified_base 8: mod_base = um
  modified_base 9: mod_base = OTHER; note = 2'-fluoroguanosine
  modified_base 10: mod_base = OTHER; note = 2'-fluoroadenosine
  modified_base 11: mod_base = OTHER; note = 2'-fluoroadenosine
  modified_base 12: mod_base = cm
  modified_base 13: mod_base = cm
  modified_base 14: mod_base = OTHER; note = 2'-O-methyladenosine
  modified_base 15: mod_base = OTHER; note = 2'-O-methyladenosine
  modified_base 16: mod_base = gm
  modified_base 17: mod_base = OTHER; note = 2'-O-methyladenosine
  modified_base 18: mod_base = gm
  modified_base 19: mod_base = OTHER; note = 2'-O-methylcytidine with a 3'-phosphorothioate linkage
  modified_base 20: mod_base = OTHER; note = 2'-O-methyladenosine with a 3'-phosphorothioate linkage
  modified_base 21: mod_base = OTHER; note = 2'-O-methyladenosine
ttttacttgaaccaagagcaa

SEQ ID NO: 263 - RNA, 21 nt, synthetic construct
  source 1..21: mol_type = other RNA
  modified_base 1: mod_base = OTHER; note = 2'-O-methyluridine with a 3'-phosphorothioate linkage
  modified_base 2: mod_base = OTHER; note = 2'-O-methylcytidine with a 3'-phosphorothioate linkage
  modified_base 3: mod_base = cm
  modified_base 4: mod_base = um
  modified_base 5: mod_base = gm
  modified_base 6: mod_base = OTHER; note = 2'-O-methyladenosine
  modified_base 7: mod_base = OTHER; note = 2'-O-methyladenosine
  modified_base 8: mod_base = OTHER; note = 2'-O-methyladenosine
  modified_base 9: mod_base = OTHER; note = 2'-fluorouridine
  modified_base 10: mod_base = OTHER; note = 2'-fluoroguanosine
  modified_base 11: mod_base = OTHER; note = 2'-fluorocytidine
  modified_base 12: mod_base = um
  modified_base 13: mod_base = um
  modified_base 14: mod_base = gm
  modified_base 15: mod_base = OTHER; note = 2'-O-methyladenosine
  modified_base 16: mod_base = um
  modified_base 17: mod_base = gm
  modified_base 18: mod_base = OTHER; note = 2'-O-methyladenosine
  modified_base 19: mod_base = OTHER; note = 2'-O-methyluridine with a 3'-phosphorothioate linkage
  modified_base 20: mod_base = OTHER; note = 2'-O-methyladenosine with a 3'-phosphorothioate linkage
  modified_base 21: mod_base = OTHER; note = 2'-O-methyladenosine
tcctgaaatgcttgatgataa

SEQ ID NO: 264 - RNA, 21 nt, synthetic construct
  source 1..21: mol_type = other RNA
  modified_base 1: mod_base = OTHER; note = 2'-O-methyluridine with a 3'-phosphorothioate linkage
  modified_base 2: mod_base = OTHER; note = 2'-O-methylguanosine with a 3'-phosphorothioate linkage
  modified_base 3: mod_base = OTHER; note = 2'-O-methyladenosine
  modified_base 4: mod_base = OTHER; note = 2'-O-methyladenosine
  modified_base 5: mod_base = OTHER; note = 2'-O-methyladenosine
  modified_base 6: mod_base = um
  modified_base 7: mod_base = gm
  modified_base 8: mod_base = cm
  modified_base 9: mod_base = OTHER; note = 2'-fluorouridine
  modified_base 10: mod_base = OTHER; note = 2'-fluorouridine
  modified_base 11: mod_base = OTHER; note = 2'-fluoroguanosine
  modified_base 12: mod_base = OTHER; note = 2'-O-methyladenosine
  modified_base 13: mod_base = um
  modified_base 14: mod_base = gm
  modified_base 15: mod_base = OTHER; note = 2'-O-methyladenosine
  modified_base 16: mod_base = um
  modified_base 17: mod_base = OTHER; note = 2'-O-methyladenosine
  modified_base 18: mod_base = cm
  modified_base 19: mod_base = OTHER; note = 2'-O-methyladenosine with a 3'-phosphorothioate linkage
  modified_base 20: mod_base = OTHER; note = 2'-O-methyladenosine with a 3'-phosphorothioate linkage
  modified_base 21: mod_base = OTHER; note = 2'-O-methyladenosine
tgaaatgcttgatgatacaaa

SEQ ID NO: 265 - RNA, 21 nt, synthetic construct
  source 1..21: mol_type = other RNA
  modified_base 1: mod_base = OTHER; note = 2'-O-methylcytidine with a 3'-phosphorothioate linkage
  modified_base 2: mod_base = OTHER; note = 2'-O-methyladenosine with a 3'-phosphorothioate linkage
  modified_base 3: mod_base = OTHER; note = 2'-O-methyladenosine
  modified_base 4: mod_base = gm
  modified_base 5: mod_base = gm
  modified_base 6: mod_base = um
  modified_base 7: mod_base = OTHER; note = 2'-O-methyladenosine
  modified_base 8: mod_base = OTHER; note = 2'-O-methyladenosine
  modified_base 9: mod_base = OTHER; note = 2'-fluoroadenosine
  modified_base 10: mod_base = OTHER; note = 2'-fluorocytidine
  modified_base 11: mod_base = OTHER; note = 2'-fluorocytidine
  modified_base 12: mod_base = um
  modified_base 13: mod_base = gm
  modified_base 14: mod_base = cm
  modified_base 15: mod_base = um
  modified_base 16: mod_base = OTHER; note = 2'-O-methyladenosine
  modified_base 17: mod_base = um
  modified_base 18: mod_base = um
  modified_base 19: mod_base = OTHER; note = 2'-O-methylguanosine with a 3'-phosphorothioate linkage
  modified_base 20: mod_base = OTHER; note = 2'-O-methylcytidine with a 3'-phosphorothioate linkage
  modified_base 21: mod_base = OTHER; note = 2'-O-methyladenosine
caaggtaaacctgctattgca

SEQ ID NO: 266 - RNA, 21 nt, synthetic construct
  source 1..21: mol_type = other RNA
  modified_base 1: mod_base = OTHER; note = 2'-O-methylguanosine with a 3'-phosphorothioate linkage
  modified_base 2: mod_base = OTHER; note = 2'-O-methylguanosine with a 3'-phosphorothioate linkage
  modified_base 3: mod_base = gm
  modified_base 4: mod_base = cm
  modified_base 5: mod_base = um
  modified_base 6: mod_base = cm
  modified_base 7: mod_base = cm
  modified_base 8: mod_base = um
  modified_base 9: mod_base = OTHER; note = 2'-fluorouridine
  modified_base 10: mod_base = OTHER; note = 2'-fluoroadenosine
  modified_base 11: mod_base = OTHER; note = 2'-fluorouridine
  modified_base 12: mod_base = OTHER; note = 2'-O-methyladenosine
  modified_base 13: mod_base = um
  modified_base 14: mod_base = gm
  modified_base 15: mod_base = OTHER; note = 2'-O-methyladenosine
  modified_base 16: mod_base = cm
  modified_base 17: mod_base = um
  modified_base 18: mod_base = OTHER; note = 2'-O-methyladenosine
  modified_base 19: mod_base = OTHER; note = 2'-O-methyluridine with a 3'-phosphorothioate linkage
  modified_base 20: mod_base = OTHER; note = 2'-O-methyluridine with a 3'-phosphorothioate linkage
  modified_base 21: mod_base = OTHER; note = 2'-O-methyladenosine
gggctccttatatgactatta

SEQ ID NO: 267 - RNA, 21 nt, synthetic construct
  source 1..21: mol_type = other RNA
  modified_base 1: mod_base = OTHER; note = 2'-O-methylguanosine with a 3'-phosphorothioate linkage
  modified_base 2: mod_base = OTHER; note = 2'-O-methylguanosine with a 3'-phosphorothioate linkage
  modified_base 3: mod_base = cm
  modified_base 4: mod_base = um
  modified_base 5: mod_base = cm
  modified_base 6: mod_base = cm
  modified_base 7: mod_base = um
  modified_base 8: mod_base = gm
  modified_base 9: mod_base = OTHER; note = 2'-fluoroadenosine
  modified_base 10: mod_base = OTHER; note = 2'-fluoroadenosine
  modified_base 11: mod_base = OTHER; note = 2'-fluoroadenosine
  modified_base 12: mod_base = um
  modified_base 13: mod_base = gm
  modified_base 14: mod_base = cm
  modified_base 15: mod_base = um
  modified_base 16: mod_base = um
  modified_base 17: mod_base = gm
  modified_base 18: mod_base = OTHER; note = 2'-O-methyladenosine
  modified_base 19: mod_base = OTHER; note = 2'-O-methyluridine with a 3'-phosphorothioate linkage
  modified_base 20: mod_base = OTHER; note = 2'-O-methylguanosine with a 3'-phosphorothioate linkage
  modified_base 21: mod_base = OTHER; note = 2'-O-methyladenosine
ggctcctgaaatgcttgatga

SEQ ID NO: 268 - RNA, 21 nt, synthetic construct
  source 1..21: mol_type = other RNA
  modified_base 1: mod_base = OTHER; note = 2'-O-methyluridine with a 3'-phosphorothioate linkage
  modified_base 2: mod_base = OTHER; note = 2'-O-methyluridine with a 3'-phosphorothioate linkage
  modified_base 3: mod_base = um
  modified_base 4: mod_base = OTHER; note = 2'-O-methyladenosine
  modified_base 5: mod_base = um
  modified_base 6: mod_base = um
  modified_base 7: mod_base = um
  modified_base 8: mod_base = um
  modified_base 9: mod_base = OTHER; note = 2'-fluoroadenosine
  modified_base 10: mod_base = OTHER; note = 2'-fluorocytidine
  modified_base 11: mod_base = OTHER; note = 2'-fluorouridine
  modified_base 12: mod_base = um
  modified_base 13: mod_base = gm
  modified_base 14: mod_base = OTHER; note = 2'-O-methyladenosine
  modified_base 15: mod_base = OTHER; note = 2'-O-methyladenosine
  modified_base 16: mod_base = cm
  modified_base 17: mod_base = cm
  modified_base 18: mod_base = OTHER; note = 2'-O-methyladenosine
  modified_base 19: mod_base = OTHER; note = 2'-O-methyladenosine with a 3'-phosphorothioate linkage
  modified_base 20: mod_base = OTHER; note = 2'-O-methylguanosine with a 3'-phosphorothioate linkage
  modified_base 21: mod_base = OTHER; note = 2'-O-methyladenosine
tttattttacttgaaccaaga

SEQ ID NO: 269 - RNA, 21 nt, synthetic construct
  source 1..21: mol_type = other RNA
  modified_base 1: mod_base = OTHER; note = 2'-O-methyluridine with a 3'-phosphorothioate linkage
  modified_base 2: mod_base = OTHER; note = 2'-O-methyluridine with a 3'-phosphorothioate linkage
  modified_base 3: mod_base = gm
  modified_base 4: mod_base = OTHER; note = 2'-O-methyladenosine
  modified_base 5: mod_base = um
  modified_base 6: mod_base = gm
  modified_base 7: mod_base = OTHER; note = 2'-O-methyladenosine
  modified_base 8: mod_base = um
  modified_base 9: mod_base = OTHER; note = 2'-fluoroadenosine
  modified_base 10: mod_base = OTHER; note = 2'-fluorocytidine
  modified_base 11: mod_base = OTHER; note = 2'-fluoroadenosine
  modified_base 12: mod_base = OTHER; note = 2'-O-methyladenosine
  modified_base 13: mod_base = um
  modified_base 14: mod_base = gm
  modified_base 15: mod_base = OTHER; note = 2'-O-methyladenosine
  modified_base 16: mod_base = OTHER; note = 2'-O-methyladenosine
  modified_base 17: mod_base = um
  modified_base 18: mod_base = gm
  modified_base 19: mod_base = OTHER; note = 2'-O-methyluridine with a 3'-phosphorothioate linkage
  modified_base 20: mod_base = OTHER; note = 2'-O-methylguanosine with a 3'-phosphorothioate linkage
  modified_base 21: mod_base = OTHER; note = 2'-O-methyladenosine
ttgatgatacaatgaatgtga

SEQ ID NO: 270 - RNA, 21 nt, synthetic construct
  source 1..21: mol_type = other RNA
  modified_base 1: mod_base = OTHER; note = 2'-O-methyluridine with a 3'-phosphorothioate linkage
  modified_base 2: mod_base = OTHER; note = 2'-O-methylguanosine with a 3'-phosphorothioate linkage
  modified_base 3: mod_base = OTHER; note = 2'-O-methyladenosine
  modified_base 4: mod_base = um
  modified_base 5: mod_base = um
  modified_base 6: mod_base = cm
  modified_base 7: mod_base = OTHER; note = 2'-O-methyladenosine
  modified_base 8: mod_base = OTHER; note = 2'-O-methyladenosine
  modified_base 9: mod_base = OTHER; note = 2'-fluorouridine
  modified_base 10: mod_base = OTHER; note = 2'-fluoroadenosine
  modified_base 11: mod_base = OTHER; note = 2'-fluorocytidine
  modified_base 12: mod_base = um
  modified_base 13: mod_base = gm
  modified_base 14: mod_base = OTHER; note = 2'-O-methyladenosine
  modified_base 15: mod_base = OTHER; note = 2'-O-methyladenosine
  modified_base 16: mod_base = cm
  modified_base 17: mod_base = OTHER; note = 2'-O-methyladenosine
  modified_base 18: mod_base = cm
  modified_base 19: mod_base = OTHER; note = 2'-O-methyluridine with a 3'-phosphorothioate linkage
  modified_base 20: mod_base = OTHER; note = 2'-O-methyladenosine with a 3'-phosphorothioate linkage
  modified_base 21: mod_base = OTHER; note = 2'-O-methyladenosine
tgattcaatactgaacactaa

SEQ ID NO: 271 - RNA, 21 nt, synthetic construct
  source 1..21: mol_type = other RNA
  modified_base 1: mod_base = OTHER; note = 2'-O-methyladenosine with a 3'-phosphorothioate linkage
  modified_base 2: mod_base = OTHER; note = 2'-O-methyluridine with a 3'-phosphorothioate linkage
  modified_base 3: mod_base = cm
  modified_base 4: mod_base = um
  modified_base 5: mod_base = OTHER; note = 2'-O-methyladenosine
  modified_base 6: mod_base = um
  modified_base 7: mod_base = um
  modified_base 8: mod_base = cm
  modified_base 9: mod_base = OTHER; note = 2'-fluorouridine
  modified_base 10: mod_base = OTHER; note = 2'-fluoroguanosine
  modified_base 11: mod_base = OTHER; note = 2'-fluorouridine
  modified_base 12: mod_base = um
  modified_base 13: mod_base = gm
  modified_base 14: mod_base = gm
  modified_base 15: mod_base = um
  modified_base 16: mod_base = cm
  modified_base 17: mod_base = um
  modified_base 18: mod_base = gm
  modified_base 19: mod_base = OTHER; note = 2'-O-methylguanosine with a 3'-phosphorothioate linkage
  modified_base 20: mod_base = OTHER; note = 2'-O-methyluridine with a 3'-phosphorothioate linkage
  modified_base 21: mod_base = OTHER; note = 2'-O-methyladenosine
atctattctgttggtctggta

SEQ ID NO: 272 - RNA, 21 nt, synthetic construct
  source 1..21: mol_type = other RNA
  modified_base 1: mod_base = OTHER; note = 2'-O-methyladenosine with a 3'-phosphorothioate linkage
  modified_base 2: mod_base = OTHER; note = 2'-O-methylguanosine with a 3'-phosphorothioate linkage
  modified_base 3: mod_base = um
  modified_base 4: mod_base = um
  modified_base 5: mod_base = gm
  modified_base 6: mod_base = OTHER; note = 2'-O-methyladenosine
  modified_base 7: mod_base = cm
  modified_base 8: mod_base = um
  modified_base 9: mod_base = OTHER; note = 2'-fluorouridine
  modified_base 10: mod_base = OTHER; note = 2'-fluorocytidine
  modified_base 11: mod_base = OTHER; note = 2'-fluoroadenosine
  modified_base 12: mod_base = um
  modified_base 13: mod_base = cm
  modified_base 14: mod_base = cm
  modified_base 15: mod_base = OTHER; note = 2'-O-methyladenosine
  modified_base 16: mod_base = OTHER; note = 2'-O-methyladenosine
  modified_base 17: mod_base = um
  modified_base 18: mod_base = cm
  modified_base 19: mod_base = OTHER; note = 2'-O-methyluridine with a 3'-phosphorothioate linkage
  modified_base 20: mod_base = OTHER; note = 2'-O-methylcytidine with a 3'-phosphorothioate linkage
  modified_base 21: mod_base = OTHER; note = 2'-O-methyladenosine
agttgacttcatccaatctca

SEQ ID NO: 273 - RNA, 21 nt, synthetic construct
  source 1..21: mol_type = other RNA
  modified_base 1: mod_base = OTHER; note = 2'-O-methylcytidine with a 3'-phosphorothioate linkage
  modified_base 2: mod_base = OTHER; note = 2'-O-methyluridine with a 3'-phosphorothioate linkage
  modified_base 3: mod_base = cm
  modified_base 4: mod_base = OTHER; note = 2'-O-methyladenosine
  modified_base 5: mod_base = um
  modified_base 6: mod_base = cm
  modified_base 7: mod_base = gm
  modified_base 8: mod_base = OTHER; note = 2'-O-methyladenosine
  modified_base 9: mod_base = OTHER; note = 2'-fluoroguanosine
  modified_base 10: mod_base = OTHER; note = 2'-fluoroadenosine
  modified_base 11: mod_base = OTHER; note = 2'-fluorocytidine
  modified_base 12: mod_base = OTHER; note = 2'-O-methyladenosine
  modified_base 13: mod_base = um
  modified_base 14: mod_base = OTHER; note = 2'-O-methyladenosine
  modified_base 15: mod_base = OTHER; note = 2'-O-methyladenosine
  modified_base 16: mod_base = OTHER; note = 2'-O-methyladenosine
  modified_base 17: mod_base = OTHER; note = 2'-O-methyladenosine
  modified_base 18: mod_base = um
  modified_base 19: mod_base = OTHER; note = 2'-O-methylcytidine with a 3'-phosphorothioate linkage
  modified_base 20: mod_base = OTHER; note = 2'-O-methyladenosine with a 3'-phosphorothioate linkage
  modified_base 21: mod_base = OTHER; note = 2'-O-methyladenosine
ctcatcgagacataaaatcaa

SEQ ID NO: 274 - RNA, 21 nt, synthetic construct
  source 1..21: mol_type = other RNA
  modified_base 1: mod_base = OTHER; note = 2'-O-methyluridine with a 3'-phosphorothioate linkage
  modified_base 2: mod_base = OTHER; note = 2'-O-methyladenosine with a 3'-phosphorothioate linkage
  modified_base 3: mod_base = cm
  modified_base 4: mod_base = cm
  modified_base 5: mod_base = um
  modified_base 6: mod_base = cm
  modified_base 7: mod_base = OTHER; note = 2'-O-methyladenosine
  modified_base 8: mod_base = OTHER; note = 2'-O-methyladenosine
  modified_base 9: mod_base = OTHER; note = 2'-fluoroadenosine
  modified_base 10: mod_base = OTHER; note = 2'-fluoroguanosine
  modified_base 11: mod_base = OTHER; note = 2'-fluoroadenosine
  modified_base 12: mod_base = um
  modified_base 13: mod_base = OTHER; note = 2'-O-methyladenosine
  modified_base 14: mod_base = OTHER; note = 2'-O-methyladenosine
  modified_base 15: mod_base = gm
  modified_base 16: mod_base = OTHER; note = 2'-O-methyladenosine
  modified_base 17: mod_base = cm
  modified_base 18: mod_base = OTHER; note = 2'-O-methyladenosine
  modified_base 19: mod_base = OTHER; note = 2'-O-methylguanosine with a 3'-phosphorothioate linkage
  modified_base 20: mod_base = OTHER; note = 2'-O-methyluridine with a 3'-phosphorothioate linkage
  modified_base 21: mod_base = OTHER; note = 2'-O-methyladenosine
tacctcaaagataagacagta

SEQ ID NO: 275 - RNA, 21 nt, synthetic construct
  source 1..21: mol_type = other RNA
  modified_base 1: mod_base = OTHER; note = 2'-O-methyluridine with a 3'-phosphorothioate linkage
  modified_base 2: mod_base = OTHER; note = 2'-O-methyladenosine with a 3'-phosphorothioate linkage
  modified_base 3: mod_base = um
  modified_base 4: mod_base = OTHER; note = 2'-O-methyladenosine
  modified_base 5: mod_base = gm
  modified_base 6: mod_base = um
  modified_base 7: mod_base = cm
  modified_base 8: mod_base = OTHER; note = 2'-O-methyladenosine
  modified_base 9: mod_base = OTHER; note = 2'-fluorouridine
  modified_base 10: mod_base = OTHER; note = 2'-fluorouridine
  modified_base 11: mod_base = OTHER; note = 2'-fluoroadenosine
  modified_base 12: mod_base = OTHER; note = 2'-O-methyladenosine
  modified_base 13: mod_base = gm
  modified_base 14: mod_base = um
  modified_base 15: mod_base = um
  modified_base 16: mod_base = um
  modified_base 17: mod_base = um
  modified_base 18: mod_base = um
  modified_base 19: mod_base = OTHER; note = 2'-O-methyladenosine with a 3'-phosphorothioate linkage
  modified_base 20: mod_base = OTHER; note = 2'-O-methyluridine with a 3'-phosphorothioate linkage
  modified_base 21: mod_base = OTHER; note = 2'-O-methyladenosine
tatagtcattaagtttttata

SEQ ID NO: 276 - RNA, 21 nt, synthetic construct
  source 1..21: mol_type = other RNA
  modified_base 1: mod_base = OTHER; note = 2'-O-methylcytidine with a 3'-phosphorothioate linkage
  modified_base 2: mod_base = OTHER; note = 2'-O-methyladenosine with a 3'-phosphorothioate linkage
  modified_base 3: mod_base = OTHER; note = 2'-O-methyladenosine
  modified_base 4: mod_base = OTHER; note = 2'-O-methyladenosine
  modified_base 5: mod_base = gm
  modified_base 6: mod_base = OTHER; note = 2'-O-methyladenosine
  modified_base 7: mod_base = um
  modified_base 8: mod_base = OTHER; note = 2'-O-methyladenosine
  modified_base 9: mod_base = OTHER; note = 2'-fluoroadenosine
  modified_base 10: mod_base = OTHER; note = 2'-fluoroguanosine
  modified_base 11: mod_base = OTHER; note = 2'-fluoroadenosine
  modified_base 12: mod_base = cm
  modified_base 13: mod_base = OTHER; note = 2'-O-methyladenosine
  modified_base 14: mod_base = gm
  modified_base 15: mod_base = um
  modified_base 16: mod_base = OTHER; note = 2'-O-methyladenosine
  modified_base 17: mod_base = cm
  modified_base 18: mod_base = OTHER; note = 2'-O-methyladenosine
  modified_base 19: mod_base = OTHER; note = 2'-O-methylguanosine with a 3'-phosphorothioate linkage
  modified_base 20: mod_base = OTHER; note = 2'-O-methyluridine with a 3'-phosphorothioate linkage
  modified_base 21: mod_base = OTHER; note = 2'-O-methyladenosine
caaagataagacagtacagta

SEQ ID NO: 277 - RNA, 21 nt, synthetic construct
  source 1..21: mol_type = other RNA
  modified_base 1: mod_base = OTHER; note = 2'-O-methyladenosine with a 3'-phosphorothioate linkage
  modified_base 2: mod_base = OTHER; note = 2'-O-methyladenosine with a 3'-phosphorothioate linkage
  modified_base 3: mod_base = OTHER; note = 2'-O-methyladenosine
  modified_base 4: mod_base = gm
  modified_base 5: mod_base = OTHER; note = 2'-O-methyladenosine
  modified_base 6: mod_base = OTHER; note = 2'-O-methyladenosine
  modified_base 7: mod_base = um
  modified_base 8: mod_base = OTHER; note = 2'-O-methyladenosine
  modified_base 9: mod_base = OTHER; note = 2'-fluorouridine
  modified_base 10: mod_base = OTHER; note = 2'-fluorocytidine
  modified_base 11: mod_base = OTHER; note = 2'-fluorouridine
  modified_base 12: mod_base = um
  modified_base 13: mod_base = OTHER; note = 2'-O-methyladenosine
  modified_base 14: mod_base = gm
  modified_base 15: mod_base = um
  modified_base 16: mod_base = gm
  modified_base 17: mod_base = OTHER; note = 2'-O-methyladenosine
  modified_base 18: mod_base = OTHER; note = 2'-O-methyladenosine
  modified_base 19: mod_base = OTHER; note = 2'-O-methyladenosine with a 3'-phosphorothioate linkage
  modified_base 20: mod_base = OTHER; note = 2'-O-methyladenosine with a 3'-phosphorothioate linkage
  modified_base 21: mod_base = OTHER; note = 2'-O-methyladenosine
aaagaatatcttagtgaaaaa

SEQ ID NO: 278 - RNA, 21 nt, synthetic construct
  source 1..21: mol_type = other RNA
  modified_base 1: mod_base = OTHER; note = 2'-O-methyladenosine with a 3'-phosphorothioate linkage
  modified_base 2: mod_base = OTHER; note = 2'-O-methylcytidine with a 3'-phosphorothioate linkage
  modified_base 3: mod_base = cm
  modified_base 4: mod_base = OTHER; note = 2'-O-methyladenosine
  modified_base 5: mod_base = OTHER; note = 2'-O-methyladenosine
  modified_base 6: mod_base = um
  modified_base 7: mod_base = um
  modified_base 8: mod_base = gm
  modified_base 9: mod_base = OTHER; note = 2'-fluorocytidine
  modified_base 10: mod_base = OTHER; note = 2'-fluorocytidine
  modified_base 11: mod_base = OTHER; note = 2'-fluorouridine
  modified_base 12: mod_base = um
  modified_base 13: mod_base = OTHER; note = 2'-O-methyladenosine
  modified_base 14: mod_base = um
  modified_base 15: mod_base = um
  modified_base 16: mod_base = OTHER; note = 2'-O-methyladenosine
  modified_base 17: mod_base = um
  modified_base 18: mod_base = gm
  modified_base 19: mod_base = OTHER; note = 2'-O-methyladenosine with a 3'-phosphorothioate linkage
  modified_base 20: mod_base = OTHER; note = 2'-O-methylcytidine with a 3'-phosphorothioate linkage
  modified_base 21: mod_base = OTHER; note = 2'-O-methyladenosine
accaattgccttattatgaca

SEQ ID NO: 279 - RNA, 21 nt, synthetic construct
  source 1..21: mol_type = other RNA
  modified_base 1: mod_base = OTHER; note = 2'-O-methyluridine with a 3'-phosphorothioate linkage
  modified_base 2: mod_base = OTHER; note = 2'-O-methyluridine with a 3'-phosphorothioate linkage
  modified_base 3: mod_base = um
  modified_base 4: mod_base = um
  modified_base 5: mod_base = um
  modified_base 6: mod_base = gm
  modified_base 7: mod_base = um
  modified_base 8: mod_base = um
  modified_base 9: mod_base = OTHER; note = 2'-fluorocytidine
  modified_base 10: mod_base = OTHER; note = 2'-fluorouridine
  modified_base 11: mod_base = OTHER; note = 2'-fluoroadenosine
  modified_base 12: mod_base = cm
  modified_base 13: mod_base = cm
  modified_base 14: mod_base = um
  modified_base 15: mod_base = cm
  modified_base 16: mod_base = OTHER; note = 2'-O-methyladenosine
  modified_base 17: mod_base = OTHER; note = 2'-O-methyladenosine
  modified_base 18: mod_base = OTHER; note = 2'-O-methyladenosine
  modified_base 19: mod_base = OTHER; note = 2'-O-methylguanosine with a 3'-phosphorothioate linkage
  modified_base 20: mod_base = OTHER; note = 2'-O-methyladenosine with a 3'-phosphorothioate linkage
  modified_base 21: mod_base = OTHER; note = 2'-O-methyladenosine
tttttgttctacctcaaagaa

SEQ ID NO: 280 - RNA, 21 nt, synthetic construct
  source 1..21: mol_type = other RNA
  modified_base 1: mod_base = OTHER; note = 2'-O-methyluridine with a 3'-phosphorothioate linkage
  modified_base 2: mod_base = OTHER; note = 2'-O-methyluridine with a 3'-phosphorothioate linkage
  modified_base 3: mod_base = cm
  modified_base 4: mod_base = cm
  modified_base 5: mod_base = OTHER; note = 2'-O-methyladenosine
  modified_base 6: mod_base = um
  modified_base 7: mod_base = um
  modified_base 8: mod_base = um
  modified_base 9: mod_base = OTHER; note = 2'-fluorouridine
  modified_base 10: mod_base = OTHER; note = 2'-fluorocytidine
  modified_base 11: mod_base = OTHER; note = 2'-fluorocytidine
  modified_base 12: mod_base = cm
  modified_base 13: mod_base = cm
  modified_base 14: mod_base = um
  modified_base 15: mod_base = um
  modified_base 16: mod_base = um
  modified_base 17: mod_base = OTHER; note = 2'-O-methyladenosine
  modified_base 18: mod_base = um
  modified_base 19: mod_base = OTHER; note = 2'-O-methylguanosine with a 3'-phosphorothioate linkage
  modified_base 20: mod_base = OTHER; note = 2'-O-methyluridine with a 3'-phosphorothioate linkage
  modified_base 21: mod_base = OTHER; note = 2'-O-methyladenosine
ttccattttcccctttatgta

SEQ ID NO: 281 - RNA, 21 nt, synthetic construct
  source 1..21: mol_type = other RNA
  modified_base 1: mod_base = OTHER; note = 2'-O-methylcytidine with a 3'-phosphorothioate linkage
  modified_base 2: mod_base = OTHER; note = 2'-O-methyluridine with a 3'-phosphorothioate linkage
  modified_base 3: mod_base = OTHER; note = 2'-O-methyladenosine
  modified_base 4: mod_base = cm
  modified_base 5: mod_base = cm
  modified_base 6: mod_base = um
  modified_base 7: mod_base = cm
  modified_base 8: mod_base = OTHER; note = 2'-O-methyladenosine
  modified_base 9: mod_base = OTHER; note = 2'-fluoroadenosine
  modified_base 10: mod_base = OTHER; note = 2'-fluoroadenosine
  modified_base 11: mod_base = OTHER; note = 2'-fluoroguanosine
  modified_base 12: mod_base = OTHER; note = 2'-O-methyladenosine
  modified_base 13: mod_base = um
  modified_base 14: mod_base = OTHER; note = 2'-O-methyladenosine
  modified_base 15: mod_base = OTHER; note = 2'-O-methyladenosine
  modified_base 16: mod_base = gm
  modified_base 17: mod_base = OTHER; note = 2'-O-methyladenosine
  modified_base 18: mod_base = cm
  modified_base 19: mod_base = OTHER; note = 2'-O-methyladenosine with a 3'-phosphorothioate linkage
  modified_base 20: mod_base = OTHER; note = 2'-O-methylguanosine with a 3'-phosphorothioate linkage
  modified_base 21: mod_base = OTHER; note = 2'-O-methyladenosine
ctacctcaaagataagacaga

SEQ ID NO: 282 - RNA, 21 nt, synthetic construct
  source 1..21: mol_type = other RNA
  modified_base 1: mod_base = OTHER; note = 2'-O-methyladenosine with a 3'-phosphorothioate linkage
  modified_base 2: mod_base = OTHER; note = 2'-O-methyladenosine with a 3'-phosphorothioate linkage
  modified_base 3: mod_base = um
  modified_base 4: mod_base = cm
  modified_base 5: mod_base = OTHER; note = 2'-O-methyladenosine
  modified_base 6: mod_base = OTHER; note = 2'-O-methyladenosine
  modified_base 7: mod_base = OTHER; note = 2'-O-methyladenosine
  modified_base 8: mod_base = gm
  modified_base 9: mod_base = OTHER; note = 2'-fluoroadenosine
  modified_base 10: mod_base = OTHER; note = 2'-fluoroadenosine
  modified_base 11: mod_base = OTHER; note = 2'-fluorouridine
  modified_base 12: mod_base = OTHER; note = 2'-O-methyladenosine
  modified_base 13: mod_base = um
  modified_base 14: mod_base = cm
  modified_base 15: mod_base = um
  modified_base 16: mod_base = um
  modified_base 17: mod_base = OTHER; note = 2'-O-methyladenosine
  modified_base 18: mod_base = gm
  modified_base 19: mod_base = OTHER; note = 2'-O-methyluridine with a 3'-phosphorothioate linkage
  modified_base 20: mod_base = OTHER; note = 2'-O-methylguanosine with a 3'-phosphorothioate linkage
  modified_base 21: mod_base = OTHER; note = 2'-O-methyladenosine
aatcaaagaatatcttagtga

SEQ ID NO: 283 - RNA, 21 nt, synthetic construct
  source 1..21: mol_type = other RNA
  modified_base 1: mod_base = OTHER; note = 2'-O-methyladenosine with a 3'-phosphorothioate linkage
  modified_base 2: mod_base = OTHER; note = 2'-O-methyluridine with a 3'-phosphorothioate linkage
  modified_base 3: mod_base = gm
  modified_base 4: mod_base = cm
  modified_base 5: mod_base = um
  modified_base 6: mod_base = um
  modified_base 7: mod_base = gm
  modified_base 8: mod_base = OTHER; note = 2'-O-methyladenosine
  modified_base 9: mod_base = OTHER; note = 2'-fluorouridine
  modified_base 10: mod_base = OTHER; note = 2'-fluoroguanosine
  modified_base 11: mod_base = OTHER; note = 2'-fluoroadenosine
  modified_base 12: mod_base = um
  modified_base 13: mod_base = OTHER; note = 2'-O-methyladenosine
  modified_base 14: mod_base = cm
  modified_base 15: mod_base = OTHER; note = 2'-O-methyladenosine
  modified_base 16: mod_base = OTHER; note = 2'-O-methyladenosine
  modified_base 17: mod_base = um
  modified_base 18: mod_base = gm
  modified_base 19: mod_base = OTHER; note = 2'-O-methyladenosine with a 3'-phosphorothioate linkage
  modified_base 20: mod_base = OTHER; note = 2'-O-methyladenosine with a 3'-phosphorothioate linkage
  modified_base 21: mod_base = OTHER; note = 2'-O-methyladenosine
atgcttgatgatacaatgaaa

SEQ ID NO: 284 - RNA, 21 nt, synthetic construct
  source 1..21: mol_type = other RNA
  modified_base 1: mod_base = OTHER; note = 2'-O-methyluridine with a 3'-phosphorothioate linkage
  modified_base 2: mod_base = OTHER; note = 2'-O-methyladenosine with a 3'-phosphorothioate linkage
  modified_base 3: mod_base = gm
  modified_base 4: mod_base = gm
  modified_base 5: mod_base = um
  modified_base 6: mod_base = gm
  modified_base 7: mod_base = OTHER; note = 2'-O-methyladenosine
  modified_base 8: mod_base = um
  modified_base 9: mod_base = OTHER; note = 2'-fluoroguanosine
  modified_base 10: mod_base = OTHER; note = 2'-fluorocytidine
  modified_base 11: mod_base = OTHER; note = 2'-fluoroadenosine
  modified_base 12: mod_base = OTHER; note = 2'-O-methyladenosine
  modified_base 13: mod_base = um
  modified_base 14: mod_base = cm
  modified_base 15: mod_base = um
  modified_base 16: mod_base = OTHER; note = 2'-O-methyladenosine
  modified_base 17: mod_base = um
  modified_base 18: mod_base = gm
  modified_base 19: mod_base = OTHER; note = 2'-O-methyluridine with a 3'-phosphorothioate linkage
  modified_base 20: mod_base = OTHER; note = 2'-O-methyluridine with a 3'-phosphorothioate linkage
  modified_base 21: mod_base = OTHER; note = 2'-O-methyladenosine
taggtgatgcaatctatgtta

SEQ ID NO: 285 - RNA, 21 nt, synthetic construct
  source 1..21: mol_type = other RNA
  modified_base 1: mod_base = OTHER; note = 2'-O-methyladenosine with a 3'-phosphorothioate linkage
  modified_base 2: mod_base = OTHER; note = 2'-O-methyluridine with a 3'-phosphorothioate linkage
  modified_base 3: mod_base = OTHER; note = 2'-O-methyladenosine
  modified_base 4: mod_base = um
  modified_base 5: mod_base = cm
  modified_base 6: mod_base = um
  modified_base 7: mod_base = cm
  modified_base 8: mod_base = OTHER; note = 2'-O-methyladenosine
  modified_base 9: mod_base = OTHER; note = 2'-fluoroadenosine
  modified_base 10: mod_base = OTHER; note = 2'-fluorocytidine
  modified_base 11: mod_base = OTHER; note = 2'-fluorouridine
  modified_base 12: mod_base = um
  modified_base 13: mod_base = um
  modified_base 14: mod_base = gm
  modified_base 15: mod_base = um
  modified_base 16: mod_base = gm
  modified_base 17: mod_base = um
  modified_base 18: mod_base = cm
  modified_base 19: mod_base = OTHER; note = 2'-O-methyladenosine with a 3'-phosphorothioate linkage
  modified_base 20: mod_base = OTHER; note = 2'-O-methyladenosine with a 3'-phosphorothioate linkage
  modified_base 21: mod_base = OTHER; note = 2'-O-methyladenosine
atatctcaactttgtgtcaaa

SEQ ID NO: 286 - RNA, 21 nt, synthetic construct
  source 1..21: mol_type = other RNA
  modified_base 1: mod_base = OTHER; note = 2'-O-methyladenosine with a 3'-phosphorothioate linkage
  modified_base 2: mod_base = OTHER; note = 2'-O-methyluridine with a 3'-phosphorothioate linkage
  modified_base 3: mod_base = gm
  modified_base 4: mod_base = OTHER; note = 2'-O-methyladenosine
  modified_base 5: mod_base = OTHER; note = 2'-O-methyladenosine
  modified_base 6: mod_base = um
  modified_base 7: mod_base = gm
  modified_base 8: mod_base = um
  modified_base 9: mod_base = OTHER; note = 2'-fluoroguanosine
  modified_base 10: mod_base = OTHER; note = 2'-fluoroadenosine
  modified_base 11: mod_base = OTHER; note = 2'-fluoroadenosine
  modified_base 12: mod_base = um
  modified_base 13: mod_base = OTHER; note = 2'-O-methyladenosine
  modified_base 14: mod_base = um
  modified_base 15: mod_base = cm
  modified_base 16: mod_base = um
  modified_base 17: mod_base = um
  modified_base 18: mod_base = um
  modified_base 19: mod_base = OTHER; note = 2'-O-methylguanosine with a 3'-phosphorothioate linkage
  modified_base 20: mod_base = OTHER; note = 2'-O-methyladenosine with a 3'-phosphorothioate linkage
  modified_base 21: mod_base = OTHER; note = 2'-O-methyladenosine
atgaatgtgaatatctttgaa

SEQ ID NO: 287 - RNA, 21 nt, synthetic construct
  source 1..21: mol_type = other RNA
  modified_base 1: mod_base = OTHER; note = 2'-O-methyluridine with a 3'-phosphorothioate linkage
  modified_base 2: mod_base = OTHER; note = 2'-O-methyluridine with a 3'-phosphorothioate linkage
  modified_base 3: mod_base = cm
  modified_base 4: mod_base = OTHER; note = 2'-O-methyladenosine
  modified_base 5: mod_base = OTHER; note = 2'-O-methyladenosine
  modified_base 6: mod_base = OTHER; note = 2'-O-methyladenosine
  modified_base 7: mod_base = cm
  modified_base 8: mod_base = gm
  modified_base 9: mod_base = OTHER; note = 2'-fluoroadenosine
  modified_base 10: mod_base = OTHER; note = 2'-fluoroguanosine
  modified_base 11: mod_base = OTHER; note = 2'-fluorocytidine
  modified_base 12: mod_base = um
  modified_base 13: mod_base = gm
  modified_base 14: mod_base = OTHER; note = 2'-O-methyladenosine
  modified_base 15: mod_base = cm
  modified_base 16: mod_base = OTHER; note = 2'-O-methyladenosine
  modified_base 17: mod_base = um
  modified_base 18: mod_base = cm
  modified_base 19: mod_base = OTHER; note = 2'-O-methyluridine with a 3'-phosphorothioate linkage
  modified_base 20: mod_base = OTHER; note = 2'-O-methyladenosine with a 3'-phosphorothioate linkage
  modified_base 21: mod_base = OTHER; note = 2'-O-methyladenosine
ttcaaacgagctgacatctaa

SEQ ID NO: 288 - RNA, 21 nt, synthetic construct
  source 1..21: mol_type = other RNA
  modified_base 1: mod_base = OTHER; note = 2'-O-methyladenosine with a 3'-phosphorothioate linkage
  modified_base 2: mod_base = OTHER; note = 2'-O-methyladenosine with a 3'-phosphorothioate linkage
  modified_base 3: mod_base = OTHER; note = 2'-O-methyladenosine
  modified_base 4: mod_base = OTHER; note = 2'-O-methyladenosine
  modified_base 5: mod_base = OTHER; note = 2'-O-methyladenosine
  modified_base 6: mod_base = um
  modified_base 7: mod_base = OTHER; note = 2'-O-methyladenosine
  modified_base 8: mod_base = OTHER; note = 2'-O-methyladenosine
  modified_base 9: mod_base = OTHER; note = 2'-fluoroadenosine
  modified_base 10: mod_base = OTHER; note = 2'-fluorouridine
  modified_base 11: mod_base = OTHER; note = 2'-fluoroadenosine
  modified_base 12: mod_base = um
  modified_base 13: mod_base = um
  modified_base 14: mod_base = gm
  modified_base 15: mod_base = cm
  modified_base 16: mod_base = um
  modified_base 17: mod_base = cm
  modified_base 18: mod_base = um
  modified_base 19: mod_base = OTHER; note = 2'-O-methyladenosine with a 3'-phosphorothioate linkage
  modified_base 20: mod_base = OTHER; note = 2'-O-methyladenosine with a 3'-phosphorothioate linkage
  modified_base 21: mod_base = OTHER; note = 2'-O-methyladenosine
aaaaataaatattgctctaaa

SEQ ID NO: 289 - RNA, 21 nt, synthetic construct
  source 1..21: mol_type = other RNA
  modified_base 1: mod_base = OTHER; note = 2'-O-methylcytidine with a 3'-phosphorothioate linkage
  modified_base 2: mod_base = OTHER; note = 2'-O-methyluridine with a 3'-phosphorothioate linkage
  modified_base 3: mod_base = cm
  modified_base 4: mod_base = um
  modified_base 5: mod_base = cm
  modified_base 6: mod_base = OTHER; note = 2'-O-methyladenosine
  modified_base 7: mod_base = um
  modified_base 8: mod_base = OTHER; note = 2'-O-methyladenosine
  modified_base 9: mod_base = OTHER; note = 2'-fluoroguanosine
  modified_base 10: mod_base = OTHER; note = 2'-fluorocytidine
  modified_base 11: mod_base = OTHER; note = 2'-fluorouridine
  modified_base 12: mod_base = um
  modified_base 13: mod_base = um
  modified_base 14: mod_base = cm
  modified_base 15: mod_base = um
  modified_base 16: mod_base = um
  modified_base 17: mod_base = um
  modified_base 18: mod_base = um
  modified_base 19: mod_base = OTHER; note = 2'-O-methylcytidine with a 3'-phosphorothioate linkage
  modified_base 20: mod_base = OTHER; note = 2'-O-methylcytidine with a 3'-phosphorothioate linkage
  modified_base 21: mod_base = OTHER; note = 2'-O-methyladenosine
ctctcatagctttcttttcca

SEQ ID NO: 290 - RNA, 21 nt, synthetic construct
  source 1..21: mol_type = other RNA
  modified_base 1: mod_base = OTHER; note = 2'-O-methyladenosine with a 3'-phosphorothioate linkage
  modified_base 2: mod_base = OTHER; note = 2'-O-methyluridine with a 3'-phosphorothioate linkage
  modified_base 3: mod_base = OTHER; note = 2'-O-methyladenosine
  modified_base 4: mod_base = gm
  modified_base 5: mod_base = OTHER; note = 2'-O-methyladenosine
  modified_base 6: mod_base = gm
  modified_base 7: mod_base = gm
  modified_base 8: mod_base = OTHER; note = 2'-O-methyladenosine
  modified_base 9: mod_base = OTHER; note = 2'-fluoroadenosine
  modified_base 10: mod_base = OTHER; note = 2'-fluoroadenosine
  modified_base 11: mod_base = OTHER; note = 2'-fluorouridine
  modified_base 12: mod_base = gm
  modified_base 13: mod_base = OTHER; note = 2'-O-methyladenosine
  modified_base 14: mod_base = gm
  modified_base 15: mod_base = OTHER; note = 2'-O-methyladenosine
  modified_base 16: mod_base = OTHER; note = 2'-O-methyladenosine
  modified_base 17: mod_base = OTHER; note = 2'-O-methyladenosine
  modified_base 18: mod_base = gm
  modified_base 19: mod_base = OTHER; note = 2'-O-methylguanosine with a 3'-phosphorothioate linkage
  modified_base 20: mod_base = OTHER; note = 2'-O-methyluridine with a 3'-phosphorothioate linkage
  modified_base 21: mod_base = OTHER; note = 2'-O-methyladenosine
atagaggaaatgagaaaggta

SEQ ID NO: 291 - RNA, 21 nt, synthetic construct
  source 1..21: mol_type = other RNA
  modified_base 1: mod_base = OTHER; note = 2'-O-methylguanosine with a 3'-phosphorothioate linkage
  modified_base 2: mod_base = OTHER; note = 2'-O-methyluridine with a 3'-phosphorothioate linkage
  modified_base 3: mod_base = gm
  modified_base 4: mod_base = OTHER; note = 2'-O-methyladenosine
  modified_base 5: mod_base = OTHER; note = 2'-O-methyladenosine
  modified_base 6: mod_base = OTHER; note = 2'-O-methyladenosine
  modified_base 7: mod_base = OTHER; note = 2'-O-methyladenosine
  modified_base 8: mod_base = OTHER; note = 2'-O-methyladenosine
  modified_base 9: mod_base = OTHER; note = 2'-fluoroguanosine
  modified_base 10: mod_base = OTHER; note = 2'-fluorouridine
  modified_base 11: mod_base = OTHER; note = 2'-fluoroguanosine
  modified_base 12: mod_base = um
  modified_base 13: mod_base = gm
  modified_base 14: mod_base = OTHER; note = 2'-O-methyladenosine
  modified_base 15: mod_base = OTHER; note = 2'-O-methyladenosine
  modified_base 16: mod_base = OTHER; note = 2'-O-methyladenosine
  modified_base 17: mod_base = cm
  modified_base 18: mod_base = um
  modified_base 19: mod_base = OTHER; note = 2'-O-methyluridine with a 3'-phosphorothioate linkage
  modified_base 20: mod_base = OTHER; note = 2'-O-methylguanosine with a 3'-phosphorothioate linkage
  modified_base 21: mod_base = OTHER; note = 2'-O-methyladenosine
gtgaaaaagtgtgaaacttga

SEQ ID NO: 292 - RNA, 21 nt, synthetic construct
  source 1..21: mol_type = other RNA
  modified_base 1: mod_base = OTHER; note = 2'-O-methyluridine with a 3'-phosphorothioate linkage
  modified_base 2: mod_base = OTHER; note = 2'-O-methylguanosine with a 3'-phosphorothioate linkage
  modified_base 3: mod_base = gm
  modified_base 4: mod_base = OTHER; note = 2'-O-methyladenosine
  modified_base 5: mod_base = cm
  modified_base 6: mod_base = um
  modified_base 7: mod_base = cm
  modified_base 8: mod_base = OTHER; note = 2'-O-methyladenosine
  modified_base 9: mod_base = OTHER; note = 2'-fluoroadenosine
  modified_base 10: mod_base = OTHER; note = 2'-fluorocytidine
  modified_base 11: mod_base = OTHER; note = 2'-fluorouridine
  modified_base 12: mod_base = um
  modified_base 13: mod_base = um
  modified_base 14: mod_base = gm
  modified_base 15: mod_base = gm
  modified_base 16: mod_base = cm
  modified_base 17: mod_base = um
  modified_base 18: mod_base = gm
  modified_base 19: mod_base = OTHER; note = 2'-O-methylguanosine with a 3'-phosphorothioate linkage
  modified_base 20: mod_base = OTHER; note = 2'-O-methyluridine with a 3'-phosphorothioate linkage
  modified_base 21: mod_base = OTHER; note = 2'-O-methyladenosine
tggactcaactttggctggta

SEQ ID NO: 293 - RNA, 21 nt, synthetic construct
  source 1..21: mol_type = other RNA
  modified_base 1: mod_base = OTHER; note = 2'-O-methyluridine with a 3'-phosphorothioate linkage
  modified_base 2: mod_base = OTHER; note = 2'-O-methyluridine with a 3'-phosphorothioate linkage
  modified_base 3: mod_base = OTHER; note = 2'-O-methyladenosine
  modified_base 4: mod_base = OTHER; note = 2'-O-methyladenosine
  modified_base 5: mod_base = gm
  modified_base 6: mod_base = um
  modified_base 7: mod_base = um
  modified_base 8: mod_base = um
  modified_base 9: mod_base = OTHER; note = 2'-fluorouridine
  modified_base 10: mod_base = OTHER; note = 2'-fluorouridine
  modified_base 11: mod_base = OTHER; note = 2'-fluoroadenosine
  modified_base 12: mod_base = um
  modified_base 13: mod_base = um
  modified_base 14: mod_base = um
  modified_base 15: mod_base = um
  modified_base 16: mod_base = OTHER; note = 2'-O-methyladenosine
  modified_base 17: mod_base = cm
  modified_base 18: mod_base = um
  modified_base 19: mod_base = OTHER; note = 2'-O-methyluridine with a 3'-phosphorothioate linkage
  modified_base 20: mod_base = OTHER; note = 2'-O-methylguanosine with a 3'-phosphorothioate linkage
  modified_base 21: mod_base = OTHER; note = 2'-O-methyladenosine
ttaagtttttattttacttga

SEQ ID NO: 294 - RNA, 21 nt, synthetic construct
  source 1..21: mol_type = other RNA
  modified_base 1: mod_base = OTHER; note = 2'-O-methylguanosine with a 3'-phosphorothioate linkage
  modified_base 2: mod_base = OTHER; note = 2'-O-methyladenosine with a 3'-phosphorothioate linkage
  modified_base 3: mod_base = OTHER; note = 2'-O-methyladenosine
  modified_base 4: mod_base = gm
  modified_base 5: mod_base = OTHER; note = 2'-O-methyladenosine
  modified_base 6: mod_base = um
  modified_base 7: mod_base = gm
  modified_base 8: mod_base = um
  modified_base 9: mod_base = OTHER; note = 2'-fluoroguanosine
  modified_base 10: mod_base = OTHER; note = 2'-fluoroguanosine
  modified_base 11: mod_base = OTHER; note = 2'-fluorocytidine
  modified_base 12: mod_base = um
  modified_base 13: mod_base = gm
  modified_base 14: mod_base = um
  modified_base 15: mod_base = gm
  modified_base 16: mod_base = OTHER; note = 2'-O-methyladenosine
  modified_base 17: mod_base = OTHER; note = 2'-O-methyladenosine
  modified_base 18: mod_base = OTHER; note = 2'-O-methyladenosine
  modified_base 19: mod_base = OTHER; note = 2'-O-methyladenosine with a 3'-phosphorothioate linkage
  modified_base 20: mod_base = OTHER; note = 2'-O-methyluridine with a 3'-phosphorothioate linkage
  modified_base 21: mod_base = OTHER; note = 2'-O-methyladenosine
gaagatgtggctgtgaaaata

SEQ ID NO: 295 - RNA, 21 nt, synthetic construct
  source 1..21: mol_type = other RNA
  modified_base 1: mod_base = OTHER; note = 2'-O-methyluridine with a 3'-phosphorothioate linkage
  modified_base 2: mod_base = OTHER; note = 2'-O-methyladenosine with a 3'-phosphorothioate linkage
  modified_base 3: mod_base = um
  modified_base 4: mod_base = gm
  modified_base 5: mod_base = um
  modified_base 6: mod_base = um
  modified_base 7: mod_base = OTHER; note = 2'-O-methyladenosine
  modified_base 8: mod_base = OTHER; note = 2'-O-methyladenosine
  modified_base 9: mod_base = OTHER; note = 2'-fluoroadenosine
  modified_base 10: mod_base = OTHER; note = 2'-fluoroadenosine
  modified_base 11: mod_base = OTHER; note = 2'-fluoroadenosine
  modified_base 12: mod_base = gm
  modified_base 13: mod_base = OTHER; note = 2'-O-methyladenosine
  modified_base 14: mod_base = OTHER; note = 2'-O-methyladenosine
  modified_base 15: mod_base = OTHER; note = 2'-O-methyladenosine
  modified_base 16: mod_base = um
  modified_base 17: mod_base = cm
  modified_base 18: mod_base = um
  modified_base 19: mod_base = OTHER; note = 2'-O-methylcytidine with a 3'-phosphorothioate linkage
  modified_base 20: mod_base = OTHER; note = 2'-O-methyluridine with a 3'-phosphorothioate linkage
  modified_base 21: mod_base = OTHER; note = 2'-O-methyladenosine
tatgttaaaaagaaatctcta

SEQ ID NO: 296 - RNA, 21 nt, synthetic construct
  source 1..21: mol_type = other RNA
  modified_base 1: mod_base = OTHER; note = 2'-O-methyluridine with a 3'-phosphorothioate linkage
  modified_base 2: mod_base = OTHER; note = 2'-O-methyladenosine with a 3'-phosphorothioate linkage
  modified_base 3: mod_base = OTHER; note = 2'-O-methyladenosine
  modified_base 4: mod_base = um
  modified_base 5: mod_base = gm
  modified_base 6: mod_base = OTHER; note = 2'-O-methyladenosine
  modified_base 7: mod_base = um
  modified_base 8: mod_base = gm
  modified_base 9: mod_base = OTHER; note = 2'-fluoroadenosine
  modified_base 10: mod_base = OTHER; note = 2'-fluorouridine
  modified_base 11: mod_base = OTHER; note = 2'-fluoroadenosine
  modified_base 12: mod_base = OTHER; note = 2'-O-methyladenosine
  modified_base 13: mod_base = um
  modified_base 14: mod_base = um
  modified_base 15: mod_base = OTHER; note = 2'-O-methyladenosine
  modified_base 16: mod_base = um
  modified_base 17: mod_base = gm
  modified_base 18: mod_base = um
  modified_base 19: mod_base = OTHER; note = 2'-O-methyluridine with a 3'-phosphorothioate linkage
  modified_base 20: mod_base = OTHER; note = 2'-O-methyladenosine with a 3'-phosphorothioate linkage
  modified_base 21: mod_base = OTHER; note = 2'-O-methyladenosine
taatgatgataattatgttaa

SEQ ID NO: 297 - RNA, 21 nt, synthetic construct
  source 1..21: mol_type = other RNA
  modified_base 1: mod_base = OTHER; note = 2'-O-methylguanosine with a 3'-phosphorothioate linkage
  modified_base 2: mod_base = OTHER; note = 2'-O-methyladenosine with a 3'-phosphorothioate linkage
  modified_base 3: mod_base = um
  modified_base 4: mod_base = OTHER; note = 2'-O-methyladenosine
  modified_base 5: mod_base = OTHER; note = 2'-O-methyladenosine
  modified_base 6: mod_base = um
  modified_base 7: mod_base = um
  modified_base 8: mod_base = OTHER; note = 2'-O-methyladenosine
  modified_base 9: mod_base = OTHER; note = 2'-fluorouridine
  modified_base 10: mod_base = OTHER; note = 2'-fluoroguanosine
  modified_base 11: mod_base = OTHER; note = 2'-fluorouridine
  modified_base 12: mod_base = um
  modified_base 13: mod_base = OTHER; note = 2'-O-methyladenosine
  modified_base 14: mod_base = OTHER; note = 2'-O-methyladenosine
  modified_base 15: mod_base = OTHER; note = 2'-O-methyladenosine
  modified_base 16: mod_base = OTHER; note = 2'-O-methyladenosine
  modified_base 17: mod_base = OTHER; note = 2'-O-methyladenosine
  modified_base 18: mod_base = gm
  modified_base 19: mod_base = OTHER; note = 2'-O-methyladenosine with a 3'-phosphorothioate linkage
  modified_base 20: mod_base = OTHER; note = 2'-O-methyladenosine with a 3'-phosphorothioate linkage
  modified_base 21: mod_base = OTHER; note = 2'-O-methyladenosine
gataattatgttaaaaagaaa

SEQ ID NO: 298 - RNA, 21 nt, synthetic construct
  source 1..21: mol_type = other RNA
  modified_base 1: mod_base = OTHER; note = 2'-O-methylguanosine with a 3'-phosphorothioate linkage
  modified_base 2: mod_base = OTHER; note = 2'-O-methyladenosine with a 3'-phosphorothioate linkage
  modified_base 3: mod_base = cm
  modified_base 4: mod_base = um
  modified_base 5: mod_base = gm
  modified_base 6: mod_base = cm
  modified_base 7: mod_base = OTHER; note = 2'-O-methyladenosine
  modified_base 8: mod_base = OTHER; note = 2'-O-methyladenosine
  modified_base 9: mod_base = OTHER; note = 2'-fluoroadenosine
  modified_base 10: mod_base = OTHER; note = 2'-fluoroguanosine
  modified_base 11: mod_base = OTHER; note = 2'-fluorocytidine
  modified_base 12: mod_base = cm
  modified_base 13: mod_base = um
  modified_base 14: mod_base = OTHER; note = 2'-O-methyladenosine
  modified_base 15: mod_base = OTHER; note = 2'-O-methyladenosine
  modified_base 16: mod_base = um
  modified_base 17: mod_base = gm
  modified_base 18: mod_base = OTHER; note = 2'-O-methyladenosine
  modified_base 19: mod_base = OTHER; note = 2'-O-methyluridine with a 3'-phosphorothioate linkage
  modified_base 20: mod_base = OTHER; note = 2'-O-methylguanosine with a 3'-phosphorothioate linkage
  modified_base 21: mod_base = OTHER; note = 2'-O-methyladenosine
gactgcaaagcctaatgatga

SEQ ID NO: 299 - RNA, 21 nt, synthetic construct
  source 1..21: mol_type = other RNA
  modified_base 1: mod_base = OTHER; note = 2'-O-methylcytidine with a 3'-phosphorothioate linkage
  modified_base 2: mod_base = OTHER; note = 2'-O-methyladenosine with a 3'-phosphorothioate linkage
  modified_base 3: mod_base = um
  modified_base 4: mod_base = um
  modified_base 5: mod_base = OTHER; note = 2'-O-methyladenosine
  modified_base 6: mod_base = OTHER; note = 2'-O-methyladenosine
  modified_base 7: mod_base = gm
  modified_base 8: mod_base = um
  modified_base 9: mod_base = OTHER; note = 2'-fluorouridine
  modified_base 10: mod_base = OTHER; note = 2'-fluorouridine
  modified_base 11: mod_base = OTHER; note = 2'-fluorouridine
  modified_base 12: mod_base = um
  modified_base 13: mod_base = OTHER; note = 2'-O-methyladenosine
  modified_base 14: mod_base = um
  modified_base 15: mod_base = um
  modified_base 16: mod_base = um
  modified_base 17: mod_base = um
  modified_base 18: mod_base = OTHER; note = 2'-O-methyladenosine
  modified_base 19: mod_base = OTHER; note = 2'-O-methylcytidine with a 3'-phosphorothioate linkage
  modified_base 20: mod_base = OTHER; note = 2'-O-methyluridine with a 3'-phosphorothioate linkage
  modified_base 21: mod_base = OTHER; note = 2'-O-methyladenosine
cattaagtttttattttacta

SEQ ID NO: 300 - RNA, 21 nt, synthetic construct
  source 1..21: mol_type = other RNA
  modified_base 1: mod_base = OTHER; note = 2'-O-methyladenosine with a 3'-phosphorothioate linkage
  modified_base 2: mod_base = OTHER; note = 2'-O-methylcytidine with a 3'-phosphorothioate linkage
  modified_base 3: mod_base = um
  modified_base 4: mod_base = gm
  modified_base 5: mod_base = cm
  modified_base 6: mod_base = um
  modified_base 7: mod_base = cm
  modified_base 8: mod_base = um
  modified_base 9: mod_base = OTHER; note = 2'-fluorouridine
  modified_base 10: mod_base = OTHER; note = 2'-fluorocytidine
  modified_base 11: mod_base = OTHER; note = 2'-fluoroguanosine
  modified_base 12: mod_base = um
  modified_base 13: mod_base = OTHER; note = 2'-O-methyladenosine
  modified_base 14: mod_base = um
  modified_base 15: mod_base = um
  modified_base 16: mod_base = OTHER; note = 2'-O-methyladenosine
  modified_base 17: mod_base = OTHER; note = 2'-O-methyladenosine
  modified_base 18: mod_base = gm
  modified_base 19: mod_base = OTHER; note = 2'-O-methyladenosine with a 3'-phosphorothioate linkage
  modified_base 20: mod_base = OTHER; note = 2'-O-methyladenosine with a 3'-phosphorothioate linkage
  modified_base 21: mod_base = OTHER; note = 2'-O-methyladenosine
actgctcttcgtattaagaaa

SEQ ID NO: 301 - RNA, 21 nt, synthetic construct
  source 1..21: mol_type = other RNA
  modified_base 1: mod_base = OTHER; note = 2'-O-methyluridine with a 3'-phosphorothioate linkage
  modified_base 2: mod_base = OTHER; note = 2'-O-methyluridine with a 3'-phosphorothioate linkage
  modified_base 3: mod_base = OTHER; note = 2'-O-methyladenosine
  modified_base 4: mod_base = um
  modified_base 5: mod_base = gm
  modified_base 6: mod_base = um
  modified_base 7: mod_base = um
  modified_base 8: mod_base = OTHER; note = 2'-O-methyladenosine
  modified_base 9: mod_base = OTHER; note = 2'-fluoroadenosine
  modified_base 10: mod_base = OTHER; note = 2'-fluoroadenosine
  modified_base 11: mod_base = OTHER; note = 2'-fluoroadenosine
  modified_base 12: mod_base = OTHER; note = 2'-O-methyladenosine
  modified_base 13: mod_base = gm
  modified_base 14: mod_base = OTHER; note = 2'-O-methyladenosine
  modified_base 15: mod_base = OTHER; note = 2'-O-methyladenosine
  modified_base 16: mod_base = OTHER; note = 2'-O-methyladenosine
  modified_base 17: mod_base = um
  modified_base 18: mod_base = cm
  modified_base 19: mod_base = OTHER; note = 2'-O-methyluridine with a 3'-phosphorothioate linkage
  modified_base 20: mod_base = OTHER; note = 2'-O-methylcytidine with a 3'-phosphorothioate linkage
  modified_base 21: mod_base = OTHER; note = 2'-O-methyladenosine
ttatgttaaaaagaaatctca

SEQ ID NO: 302 - RNA, 21 nt, synthetic construct
  source 1..21: mol_type = other RNA
  modified_base 1: mod_base = OTHER; note = 2'-O-methylguanosine with a 3'-phosphorothioate linkage
  modified_base 2: mod_base = OTHER; note = 2'-O-methyluridine with a 3'-phosphorothioate linkage
  modified_base 3: mod_base = um
  modified_base 4: mod_base = gm
  modified_base 5: mod_base = OTHER; note = 2'-O-methyladenosine
  modified_base 6: mod_base = cm
  modified_base 7: mod_base = um
  modified_base 8: mod_base = um
  modified_base 9: mod_base = OTHER; note = 2'-fluorocytidine
  modified_base 10: mod_base = OTHER; note = 2'-fluoroadenosine
  modified_base 11: mod_base = OTHER; note = 2'-fluorouridine
  modified_base 12: mod_base = cm
  modified_base 13: mod_base = cm
  modified_base 14: mod_base = OTHER; note = 2'-O-methyladenosine
  modified_base 15: mod_base = OTHER; note = 2'-O-methyladenosine
  modified_base 16: mod_base = um
  modified_base 17: mod_base = cm
  modified_base 18: mod_base = um
  modified_base 19: mod_base = OTHER; note = 2'-O-methylcytidine with a 3'-phosphorothioate linkage
  modified_base 20: mod_base = OTHER; note = 2'-O-methyluridine with a 3'-phosphorothioate linkage
  modified_base 21: mod_base = OTHER; note = 2'-O-methyladenosine
gttgacttcatccaatctcta

SEQ ID NO: 303 - RNA, 21 nt, synthetic construct
  source 1..21: mol_type = other RNA
  modified_base 1: mod_base = OTHER; note = 2'-O-methyluridine with a 3'-phosphorothioate linkage
  modified_base 2: mod_base = OTHER; note = 2'-O-methyluridine with a 3'-phosphorothioate linkage
  modified_base 3: mod_base = um
  modified_base 4: mod_base = um
  modified_base 5: mod_base = gm
  modified_base 6: mod_base = OTHER; note = 2'-O-hexadecyl uridine
  modified_base 7: mod_base = gm
  modified_base 8: mod_base = um
  modified_base 9: mod_base = OTHER; note = 2'-fluoroguanosine
  modified_base 10: mod_base = OTHER; note = 2'-fluoroadenosine
  modified_base 11: mod_base = OTHER; note = 2'-fluorouridine
  modified_base 12: mod_base = um
  modified_base 13: mod_base = cm
  modified_base 14: mod_base = um
  modified_base 15: mod_base = um
  modified_base 16: mod_base = cm
  modified_base 17: mod_base = OTHER; note = 2'-O-methyladenosine
  modified_base 18: mod_base = OTHER; note = 2'-O-methyladenosine
  modified_base 19: mod_base = OTHER; note = 2'-O-methyladenosine with a 3'-phosphorothioate linkage
  modified_base 20: mod_base = OTHER; note = 2'-O-methylcytidine with a 3'-phosphorothioate linkage
  modified_base 21: mod_base = OTHER; note = 2'-O-methyladenosine
ttttgtgtgattcttcaaaca

SEQ ID NO: 304 - RNA, 21 nt, synthetic construct
  source 1..21: mol_type = other RNA
  modified_base 1: mod_base = OTHER; note = 2'-O-methyluridine with a 3'-phosphorothioate linkage
  modified_base 2: mod_base = OTHER; note = 2'-O-methylcytidine with a 3'-phosphorothioate linkage
  modified_base 3: mod_base = um
  modified_base 4: mod_base = OTHER; note = 2'-O-methyladenosine
  modified_base 5: mod_base = OTHER; note = 2'-O-methyladenosine
  modified_base 6: mod_base = OTHER; note = 2'-O-hexadecyl adenosine
  modified_base 7: mod_base = gm
  modified_base 8: mod_base = um
  modified_base 9: mod_base = OTHER; note = 2'-fluorouridine
  modified_base 10: mod_base = OTHER; note = 2'-fluoroadenosine
  modified_base 11: mod_base = OTHER; note = 2'-fluoroadenosine
  modified_base 12: mod_base = gm
  modified_base 13: mod_base = cm
  modified_base 14: mod_base = OTHER; note = 2'-O-methyladenosine
  modified_base 15: mod_base = um
  modified_base 16: mod_base = gm
  modified_base 17: mod_base = gm
  modified_base 18: mod_base = gm
  modified_base 19: mod_base = OTHER; note = 2'-O-methylcytidine with a 3'-phosphorothioate linkage
  modified_base 20: mod_base = OTHER; note = 2'-O-methyladenosine with a 3'-phosphorothioate linkage
  modified_base 21: mod_base = OTHER; note = 2'-O-methyladenosine
tctaaagttaagcatgggcaa

SEQ ID NO: 305 - RNA, 21 nt, synthetic construct
  source 1..21: mol_type = other RNA
  modified_base 1: mod_base = OTHER; note = 2'-O-methylguanosine with a 3'-phosphorothioate linkage
  modified_base 2: mod_base = OTHER; note = 2'-O-methyladenosine with a 3'-phosphorothioate linkage
  modified_base 3: mod_base = cm
  modified_base 4: mod_base = OTHER; note = 2'-O-methyladenosine
  modified_base 5: mod_base = um
  modified_base 6: mod_base = OTHER; note = 2'-O-hexadecyl guanosine
  modified_base 7: mod_base = gm
  modified_base 8: mod_base = um
  modified_base 9: mod_base = OTHER; note = 2'-fluoroguanosine
  modified_base 10: mod_base = OTHER; note = 2'-fluorocytidine
  modified_base 11: mod_base = OTHER; note = 2'-fluorocytidine
  modified_base 12: mod_base = um
  modified_base 13: mod_base = um
  modified_base 14: mod_base = cm
  modified_base 15: mod_base = OTHER; note = 2'-O-methyladenosine
  modified_base 16: mod_base = gm
  modified_base 17: mod_base = OTHER; note = 2'-O-methyladenosine
  modified_base 18: mod_base = um
  modified_base 19: mod_base = OTHER; note = 2'-O-methylcytidine with a 3'-phosphorothioate linkage
  modified_base 20: mod_base = OTHER; note = 2'-O-methylcytidine with a 3'-phosphorothioate linkage
  modified_base 21: mod_base = OTHER; note = 2'-O-methyladenosine
gacatggtgccttcagatcca

SEQ ID NO: 306 - RNA, 21 nt, synthetic construct
  source 1..21: mol_type = other RNA
  modified_base 1: mod_base = OTHER; note = 2'-O-methyluridine with a 3'-phosphorothioate linkage
  modified_base 2: mod_base = OTHER; note = 2'-O-methylguanosine with a 3'-phosphorothioate linkage
  modified_base 3: mod_base = um
  modified_base 4: mod_base = cm
  modified_base 5: mod_base = um
  modified_base 6: mod_base = OTHER; note = 2'-O-hexadecyl uridine
  modified_base 7: mod_base = um
  modified_base 8: mod_base = um
  modified_base 9: mod_base = OTHER; note = 2'-fluoroguanosine
  modified_base 10: mod_base = OTHER; note = 2'-fluorouridine
  modified_base 11: mod_base = OTHER; note = 2'-fluoroguanosine
  modified_base 12: mod_base = um
  modified_base 13: mod_base = gm
  modified_base 14: mod_base = OTHER; note = 2'-O-methyladenosine
  modified_base 15: mod_base = um
  modified_base 16: mod_base = um
  modified_base 17: mod_base = cm
  modified_base 18: mod_base = um
  modified_base 19: mod_base = OTHER; note = 2'-O-methyluridine with a 3'-phosphorothioate linkage
  modified_base 20: mod_base = OTHER; note = 2'-O-methylcytidine with a 3'-phosphorothioate linkage
  modified_base 21: mod_base = OTHER; note = 2'-O-methyladenosine
tgtcttttgtgtgattcttca

SEQ ID NO: 307 - RNA, 21 nt, synthetic construct
  source 1..21: mol_type = other RNA
  modified_base 1: mod_base = OTHER; note = 2'-O-methylcytidine with a 3'-phosphorothioate linkage
  modified_base 2: mod_base = OTHER; note = 2'-O-methyluridine with a 3'-phosphorothioate linkage
  modified_base 3: mod_base = cm
  modified_base 4: mod_base = um
  modified_base 5: mod_base = OTHER; note = 2'-O-methyladenosine
  modified_base 6: mod_base = OTHER; note = 2'-O-hexadecyl adenosine
  modified_base 7: mod_base = OTHER; note = 2'-O-methyladenosine
  modified_base 8: mod_base = gm
  modified_base 9: mod_base = OTHER; note = 2'-fluorouridine
  modified_base 10: mod_base = OTHER; note = 2'-fluorouridine
  modified_base 11: mod_base = OTHER; note = 2'-fluoroadenosine
  modified_base 12: mod_base = OTHER; note = 2'-O-methyladenosine
  modified_base 13: mod_base = gm
  modified_base 14: mod_base = cm
  modified_base 15: mod_base = OTHER; note = 2'-O-methyladenosine
  modified_base 16: mod_base = um
  modified_base 17: mod_base = gm
  modified_base 18: mod_base = gm
  modified_base 19: mod_base = OTHER; note = 2'-O-methylguanosine with a 3'-phosphorothioate linkage
  modified_base 20: mod_base = OTHER; note = 2'-O-methylcytidine with a 3'-phosphorothioate linkage
  modified_base 21: mod_base = OTHER; note = 2'-O-methyladenosine
ctctaaagttaagcatgggca

SEQ ID NO: 308 - RNA, 21 nt, synthetic construct
  source 1..21: mol_type = other RNA
  modified_base 1: mod_base = OTHER; note = 2'-O-methyluridine with a 3'-phosphorothioate linkage
  modified_base 2: mod_base = OTHER; note = 2'-O-methyluridine with a 3'-phosphorothioate linkage
  modified_base 3: mod_base = um
  modified_base 4: mod_base = um
  modified_base 5: mod_base = OTHER; note = 2'-O-methyladenosine
  modified_base 6: mod_base = OTHER; note = 2'-O-hexadecyl cytidine
  modified_base 7: mod_base = um
  modified_base 8: mod_base = um
  modified_base 9: mod_base = OTHER; note = 2'-fluoroguanosine
  modified_base 10: mod_base = OTHER; note = 2'-fluoroadenosine
  modified_base 11: mod_base = OTHER; note = 2'-fluoroadenosine
  modified_base 12: mod_base = cm
  modified_base 13: mod_base = cm
  modified_base 14: mod_base = OTHER; note = 2'-O-methyladenosine
  modified_base 15: mod_base = OTHER; note = 2'-O-methyladenosine
  modified_base 16: mod_base = gm
  modified_base 17: mod_base = OTHER; note = 2'-O-methyladenosine
  modified_base 18: mod_base = gm
  modified_base 19: mod_base = OTHER; note = 2'-O-methylcytidine with a 3'-phosphorothioate linkage
  modified_base 20: mod_base = OTHER; note = 2'-O-methyladenosine with a 3'-phosphorothioate linkage
  modified_base 21: mod_base = OTHER; note = 2'-O-methyladenosine
ttttacttgaaccaagagcaa

SEQ ID NO: 309 - RNA, 21 nt, synthetic construct
  source 1..21: mol_type = other RNA
  modified_base 1: mod_base = OTHER; note = 2'-O-methyluridine with a 3'-phosphorothioate linkage
  modified_base 2: mod_base = OTHER; note = 2'-O-methylcytidine with a 3'-phosphorothioate linkage
  modified_base 3: mod_base = cm
  modified_base 4: mod_base = um
  modified_base 5: mod_base = gm
  modified_base 6: mod_base = OTHER; note = 2'-O-hexadecyl adenosine
  modified_base 7: mod_base = OTHER; note = 2'-O-methyladenosine
  modified_base 8: mod_base = OTHER; note = 2'-O-methyladenosine
  modified_base 9: mod_base = OTHER; note = 2'-fluorouridine
  modified_base 10: mod_base = OTHER; note = 2'-fluoroguanosine
  modified_base 11: mod_base = OTHER; note = 2'-fluorocytidine
  modified_base 12: mod_base = um
  modified_base 13: mod_base = um
  modified_base 14: mod_base = gm
  modified_base 15: mod_base = OTHER; note = 2'-O-methyladenosine
  modified_base 16: mod_base = um
  modified_base 17: mod_base = gm
  modified_base 18: mod_base = OTHER; note = 2'-O-methyladenosine
  modified_base 19: mod_base = OTHER; note = 2'-O-methyluridine with a 3'-phosphorothioate linkage
  modified_base 20: mod_base = OTHER; note = 2'-O-methyladenosine with a 3'-phosphorothioate linkage
  modified_base 21: mod_base = OTHER; note = 2'-O-methyladenosine
tcctgaaatgcttgatgataa

SEQ ID NO: 310 - RNA, 21 nt, synthetic construct
  source 1..21: mol_type = other RNA
  modified_base 1: mod_base = OTHER; note = 2'-O-methylcytidine with a 3'-phosphorothioate linkage
  modified_base 2: mod_base = OTHER; note = 2'-O-methylcytidine with a 3'-phosphorothioate linkage
  modified_base 3: mod_base = um
  modified_base 4: mod_base = gm
  modified_base 5: mod_base = OTHER; note = 2'-O-methyladenosine
  modified_base 6: mod_base = OTHER; note = 2'-O-methyladenosine
  modified_base 7: mod_base = OTHER; note = 2'-O-methyladenosine
  modified_base 8: mod_base = um
  modified_base 9: mod_base = OTHER; note = 2'-fluoroguanosine
  modified_base 10: mod_base = OTHER; note = 2'-fluorocytidine
  modified_base 11: mod_base = OTHER; note = 2'-fluorouridine
  modified_base 12: mod_base = um
  modified_base 13: mod_base = gm
  modified_base 14: mod_base = OTHER; note = 2'-O-methyladenosine
  modified_base 15: mod_base = um
  modified_base 16: mod_base = gm
  modified_base 17: mod_base = OTHER; note = 2'-O-methyladenosine
  modified_base 18: mod_base = um
  modified_base 19: mod_base = OTHER; note = 2'-O-methyladenosine with a 3'-phosphorothioate linkage
  modified_base 20: mod_base = OTHER; note = 2'-O-methylcytidine with a 3'-phosphorothioate linkage
  modified_base 21: mod_base = OTHER; note = 2'-O-methyladenosine
cctgaaatgcttgatgataca

SEQ ID NO: 311 - RNA, 21 nt, synthetic construct
  source 1..21: mol_type = other RNA
  modified_base 1: mod_base = OTHER; note = 2'-O-methylguanosine with a 3'-phosphorothioate linkage
  modified_base 2: mod_base = OTHER; note = 2'-O-methyladenosine with a 3'-phosphorothioate linkage
  modified_base 3: mod_base = OTHER; note = 2'-O-methyladenosine
  modified_base 4: mod_base = OTHER; note = 2'-O-methyladenosine
  modified_base 5: mod_base = um
  modified_base 6: mod_base = gm
  modified_base 7: mod_base = cm
  modified_base 8: mod_base = um
  modified_base 9: mod_base = OTHER; note = 2'-fluorouridine
  modified_base 10: mod_base = OTHER; note = 2'-fluoroguanosine
  modified_base 11: mod_base = OTHER; note = 2'-fluoroadenosine
  modified_base 12: mod_base = um
  modified_base 13: mod_base = gm
  modified_base 14: mod_base = OTHER; note = 2'-O-methyladenosine
  modified_base 15: mod_base = um
  modified_base 16: mod_base = OTHER; note = 2'-O-methyladenosine
  modified_base 17: mod_base = cm
  modified_base 18: mod_base = OTHER; note = 2'-O-methyladenosine
  modified_base 19: mod_base = OTHER; note = 2'-O-methyladenosine with a 3'-phosphorothioate linkage
  modified_base 20: mod_base = OTHER; note = 2'-O-methyluridine with a 3'-phosphorothioate linkage
  modified_base 21: mod_base = OTHER; note = 2'-O-methyladenosine
gaaatgcttgatgatacaata

SEQ ID NO: 312 - RNA, 21 nt, synthetic construct
  source 1..21: mol_type = other RNA
  modified_base 1: mod_base = OTHER; note = 2'-O-methyluridine with a 3'-phosphorothioate linkage
  modified_base 2: mod_base = OTHER; note = 2'-O-methylcytidine with a 3'-phosphorothioate linkage
  modified_base 3: mod_base = cm
  modified_base 4: mod_base = um
  modified_base 5: mod_base = um
  modified_base 6: mod_base = OTHER; note = 2'-O-methyladenosine
  modified_base 7: mod_base = um
  modified_base 8: mod_base = OTHER; note = 2'-O-methyladenosine
  modified_base 9: mod_base = OTHER; note = 2'-fluorouridine
  modified_base 10: mod_base = OTHER; note = 2'-fluoroguanosine
  modified_base 11: mod_base = OTHER; note = 2'-fluoroadenosine
  modified_base 12: mod_base = cm
  modified_base 13: mod_base = um
  modified_base 14: mod_base = OTHER; note = 2'-O-methyladenosine
  modified_base 15: mod_base = um
  modified_base 16: mod_base = um
  modified_base 17: mod_base = um
  modified_base 18: mod_base = gm
  modified_base 19: mod_base = OTHER; note = 2'-O-methyladenosine with a 3'-phosphorothioate linkage
  modified_base 20: mod_base = OTHER; note = 2'-O-methyladenosine with a 3'-phosphorothioate linkage
  modified_base 21: mod_base = OTHER; note = 2'-O-methyladenosine
tccttatatgactatttgaaa

SEQ ID NO: 313 - RNA, 21 nt, synthetic construct
  source 1..21: mol_type = other RNA
  modified_base 1: mod_base = OTHER; note = 2'-O-methylcytidine with a 3'-phosphorothioate linkage
  modified_base 2: mod_base = OTHER; note = 2'-O-methylcytidine with a 3'-phosphorothioate linkage
  modified_base 3: mod_base = um
  modified_base 4: mod_base = gm
  modified_base 5: mod_base = OTHER; note = 2'-O-methyladenosine
  modified_base 6: mod_base = OTHER; note = 2'-O-hexadecyl adenosine
  modified_base 7: mod_base = OTHER; note = 2'-O-methyladenosine
  modified_base 8: mod_base = um
  modified_base 9: mod_base = OTHER; note = 2'-fluoroguanosine
  modified_base 10: mod_base = OTHER; note = 2'-fluorocytidine
  modified_base 11: mod_base = OTHER; note = 2'-fluorouridine
  modified_base 12: mod_base = um
  modified_base 13: mod_base = gm
  modified_base 14: mod_base = OTHER; note = 2'-O-methyladenosine
  modified_base 15: mod_base = um
  modified_base 16: mod_base = gm
  modified_base 17: mod_base = OTHER; note = 2'-O-methyladenosine
  modified_base 18: mod_base = um
  modified_base 19: mod_base = OTHER; note = 2'-O-methyladenosine with a 3'-phosphorothioate linkage
  modified_base 20: mod_base = OTHER; note = 2'-O-methylcytidine with a 3'-phosphorothioate linkage
  modified_base 21: mod_base = OTHER; note = 2'-O-methyladenosine
cctgaaatgcttgatgataca

SEQ ID NO: 314 - RNA, 21 nt, synthetic construct
  source 1..21: mol_type = other RNA
  modified_base 1: mod_base = OTHER; note = 2'-O-methylguanosine with a 3'-phosphorothioate linkage
  modified_base 2: mod_base = OTHER; note = 2'-O-methyladenosine with a 3'-phosphorothioate linkage
  modified_base 3: mod_base = OTHER; note = 2'-O-methyladenosine
  modified_base 4: mod_base = OTHER; note = 2'-O-methyladenosine
  modified_base 5: mod_base = um
  modified_base 6: mod_base = OTHER; note = 2'-O-hexadecyl guanosine
  modified_base 7: mod_base = cm
  modified_base 8: mod_base = um
  modified_base 9: mod_base = OTHER; note = 2'-fluorouridine
  modified_base 10: mod_base = OTHER; note = 2'-fluoroguanosine
  modified_base 11: mod_base = OTHER; note = 2'-fluoroadenosine
  modified_base 12: mod_base = um
  modified_base 13: mod_base = gm
  modified_base 14: mod_base = OTHER; note = 2'-O-methyladenosine
  modified_base 15: mod_base = um
  modified_base 16: mod_base = OTHER; note = 2'-O-methyladenosine
  modified_base 17: mod_base = cm
  modified_base 18: mod_base = OTHER; note = 2'-O-methyladenosine
  modified_base 19: mod_base = OTHER; note = 2'-O-methyladenosine with a 3'-phosphorothioate linkage
  modified_base 20: mod_base = OTHER; note = 2'-O-methyluridine with a 3'-phosphorothioate linkage
  modified_base 21: mod_base = OTHER; note = 2'-O-methyladenosine
gaaatgcttgatgatacaata

SEQ ID NO: 315 - RNA, 21 nt, synthetic construct
  source 1..21: mol_type = other RNA
  modified_base 1: mod_base = OTHER; note = 2'-O-methyluridine with a 3'-phosphorothioate linkage
  modified_base 2: mod_base = OTHER; note = 2'-O-methylcytidine with a 3'-phosphorothioate linkage
  modified_base 3: mod_base = cm
  modified_base 4: mod_base = um
  modified_base 5: mod_base = um
  modified_base 6: mod_base = OTHER; note = 2'-O-hexadecyl adenosine
  modified_base 7: mod_base = um
  modified_base 8: mod_base = OTHER; note = 2'-O-methyladenosine
  modified_base 9: mod_base = OTHER; note = 2'-fluorouridine
  modified_base 10: mod_base = OTHER; note = 2'-fluoroguanosine
  modified_base 11: mod_base = OTHER; note = 2'-fluoroadenosine
  modified_base 12: mod_base = cm
  modified_base 13: mod_base = um
  modified_base 14: mod_base = OTHER; note = 2'-O-methyladenosine
  modified_base 15: mod_base = um
  modified_base 16: mod_base = um
  modified_base 17: mod_base = um
  modified_base 18: mod_base = gm
  modified_base 19: mod_base = OTHER; note = 2'-O-methyladenosine with a 3'-phosphorothioate linkage
  modified_base 20: mod_base = OTHER; note = 2'-O-methyladenosine with a 3'-phosphorothioate linkage
  modified_base 21: mod_base = OTHER; note = 2'-O-methyladenosine
tccttatatgactatttgaaa

SEQ ID NO: 316 - RNA, 23 nt, synthetic construct
  source 1..23: mol_type = other RNA
  modified_base 1: mod_base = OTHER; note = 2'-O-methyluridine with a 3'-phosphorothioate linkage
  modified_base 2: mod_base = OTHER; note = 2'-fluorouridine with a 3'-phosphorothioate linkage
  modified_base 3: mod_base = um
  modified_base 4: mod_base = gm
  modified_base 5: mod_base = OTHER; note = 2'-fluoroguanosine
  modified_base 6: mod_base = um
  modified_base 7: mod_base = OTHER; note = 2'-fluorouridine
  modified_base 8: mod_base = cm
  modified_base 9: mod_base = OTHER; note = 2'-O-methyladenosine
  modified_base 10: mod_base = OTHER; note = 2'-O-methyladenosine
  modified_base 11: mod_base = gm
  modified_base 12: mod_base = um
  modified_base 13: mod_base = OTHER; note = 2'-O-methyladenosine
  modified_base 14: mod_base = OTHER; note = 2'-fluoroadenosine
  modified_base 15: mod_base = OTHER; note = 2'-O-methyladenosine
  modified_base 16: mod_base = OTHER; note = 2'-fluoroadenosine
  modified_base 17: mod_base = um
  modified_base 18: mod_base = OTHER; note = 2'-O-methyladenosine
  modified_base 19: mod_base = OTHER; note = 2'-O-methyladenosine
  modified_base 20: mod_base = OTHER; note = 2'-O-methyladenosine
  modified_base 21: mod_base = OTHER; note = 2'-O-methyladenosine with a 3'-phosphorothioate linkage
  modified_base 22: mod_base = OTHER; note = 2'-O-methyladenosine with a 3'-phosphorothioate linkage
  modified_base 23: mod_base = cm
tttggttcaagtaaaataaaaac

SEQ ID NO: 317 - RNA, 23 nt, synthetic construct
  source 1..23: mol_type = other RNA
  modified_base 1: mod_base = OTHER; note = 2'-O-methyluridine with a 3'-phosphorothioate linkage
  modified_base 2: mod_base = OTHER; note = 2'-fluoroadenosine with a 3'-phosphorothioate linkage
  modified_base 3: mod_base = cm
  modified_base 4: mod_base = gm
  modified_base 5: mod_base = OTHER; note = 2'-fluoroadenosine
  modified_base 6: mod_base = OTHER; note = 2'-O-methyladenosine
  modified_base 7: mod_base = OTHER; note = 2'-fluoroguanosine
  modified_base 8: mod_base = OTHER; note = 2'-O-methyladenosine
  modified_base 9: mod_base = gm
  modified_base 10: mod_base = cm
  modified_base 11: mod_base = OTHER; note = 2'-O-methyladenosine
  modified_base 12: mod_base = gm
  modified_base 13: mod_base = um
  modified_base 14: mod_base = OTHER; note = 2'-fluorouridine
  modified_base 15: mod_base = OTHER; note = 2'-O-methyladenosine
  modified_base 16: mod_base = OTHER; note = 2'-fluoroguanosine
  modified_base 17: mod_base = gm
  modified_base 18: mod_base = cm
  modified_base 19: mod_base = gm
  modified_base 20: mod_base = gm
  modified_base 21: mod_base = OTHER; note = 2'-O-methylguanosine with a 3'-phosphorothioate linkage
  modified_base 22: mod_base = OTHER; note = 2'-O-methylcytidine with a 3'-phosphorothioate linkage
  modified_base 23: mod_base = cm
tacgaagagcagttaggcgggcc

SEQ ID NO: 318 - RNA, 23 nt, synthetic construct
  source 1..23: mol_type = other RNA
  modified_base 1: mod_base = OTHER; note = 2'-O-methyluridine with a 3'-phosphorothioate linkage
  modified_base 2: mod_base = OTHER; note = 2'-fluoroadenosine with a 3'-phosphorothioate linkage
  modified_base 3: mod_base = OTHER; note = 2'-O-methyladenosine
  modified_base 4: mod_base = cm
  modified_base 5: mod_base = OTHER; note = 2'-fluoroadenosine
  modified_base 6: mod_base = um
  modified_base 7: mod_base = OTHER; note = 2'-fluoroadenosine
  modified_base 8: mod_base = OTHER; note = 2'-O-methyladenosine
  modified_base 9: mod_base = um
  modified_base 10: mod_base = um
  modified_base 11: mod_base = OTHER; note = 2'-O-methyladenosine
  modified_base 12: mod_base = um
  modified_base 13: mod_base = cm
  modified_base 14: mod_base = OTHER; note = 2'-fluoroadenosine
  modified_base 15: mod_base = um
  modified_base 16: mod_base = OTHER; note = 2'-fluorocytidine
  modified_base 17: mod_base = OTHER; note = 2'-O-methyladenosine
  modified_base 18: mod_base = um
  modified_base 19: mod_base = um
  modified_base 20: mod_base = OTHER; note = 2'-O-methyladenosine
  modified_base 21: mod_base = OTHER; note = 2'-O-methylguanosine with a 3'-phosphorothioate linkage
  modified_base 22: mod_base = OTHER; note = 2'-O-methylguanosine with a 3'-phosphorothioate linkage
  modified_base 23: mod_base = cm
taacataattatcatcattaggc

SEQ ID NO: 319 - RNA, 23 nt, synthetic construct
  source 1..23: mol_type = other RNA
  modified_base 1: mod_base = OTHER; note = 2'-O-methyluridine with a 3'-phosphorothioate linkage
  modified_base 2: mod_base = OTHER; note = 2'-fluoroadenosine with a 3'-phosphorothioate linkage
  modified_base 3: mod_base = um
  modified_base 4: mod_base = OTHER; note = 2'-O-methyladenosine
  modified_base 5: mod_base = OTHER; note = 2'-fluoroguanosine
  modified_base 6: mod_base = OTHER; note = 2'-O-methyladenosine
  modified_base 7: mod_base = OTHER; note = 2'-fluoroguanosine
  modified_base 8: mod_base = cm
  modified_base 9: mod_base = um
  modified_base 10: mod_base = um
  modified_base 11: mod_base = OTHER; note = 2'-O-methyladenosine
  modified_base 12: mod_base = um
  modified_base 13: mod_base = um
  modified_base 14: mod_base = OTHER; note = 2'-fluorouridine
  modified_base 15: mod_base = um
  modified_base 16: mod_base = OTHER; note = 2'-fluoroadenosine
  modified_base 17: mod_base = um
  modified_base 18: mod_base = OTHER; note = 2'-O-methyladenosine
  modified_base 19: mod_base = cm
  modified_base 20: mod_base = um
  modified_base 21: mod_base = OTHER; note = 2'-O-methyluridine with a 3'-phosphorothioate linkage
  modified_base 22: mod_base = OTHER; note = 2'-O-methyluridine with a 3'-phosphorothioate linkage
  modified_base 23: mod_base = um
tatagagcttattttatactttt

SEQ ID NO: 320 - RNA, 23 nt, synthetic construct
  source 1..23: mol_type = other RNA
  modified_base 1: mod_base = OTHER; note = 2'-O-methyluridine with a 3'-phosphorothioate linkage
  modified_base 2: mod_base = OTHER; note = 2'-fluorocytidine with a 3'-phosphorothioate linkage
  modified_base 3: mod_base = OTHER; note = 2'-O-methyladenosine
  modified_base 4: mod_base = cm
  modified_base 5: mod_base = OTHER; note = 2'-fluoroadenosine
  modified_base 6: mod_base = um
  modified_base 7: mod_base = OTHER; note = 2'-fluoroadenosine
  modified_base 8: mod_base = OTHER; note = 2'-O-methyladenosine
  modified_base 9: mod_base = OTHER; note = 2'-O-methyladenosine
  modified_base 10: mod_base = gm
  modified_base 11: mod_base = gm
  modified_base 12: mod_base = gm
  modified_base 13: mod_base = gm
  modified_base 14: mod_base = OTHER; note = 2'-fluoroadenosine
  modified_base 15: mod_base = OTHER; note = 2'-O-methyladenosine
  modified_base 16: mod_base = OTHER; note = 2'-fluoroadenosine
  modified_base 17: mod_base = OTHER; note = 2'-O-methyladenosine
  modified_base 18: mod_base = um
  modified_base 19: mod_base = gm
  modified_base 20: mod_base = gm
  modified_base 21: mod_base = OTHER; note = 2'-O-methyladenosine with a 3'-phosphorothioate linkage
  modified_base 22: mod_base = OTHER; note = 2'-O-methyladenosine with a 3'-phosphorothioate linkage
  modified_base 23: mod_base = OTHER; note = 2'-O-methyladenosine
tcacataaaggggaaaatggaaa

SEQ ID NO: 321 - RNA, 23 nt, synthetic construct
  source 1..23: mol_type = other RNA
  modified_base 1: mod_base = OTHER; note = 2'-O-methyluridine with a 3'-phosphorothioate linkage
  modified_base 2: mod_base = OTHER; note = 2'-fluoroguanosine with a 3'-phosphorothioate linkage
  modified_base 3: mod_base = OTHER; note = 2'-O-methyladenosine
  modified_base 4: mod_base = gm
  modified_base 5: mod_base = OTHER; note = 2'-fluoroadenosine
  modified_base 6: mod_base = gm
  modified_base 7: mod_base = OTHER; note = 2'-fluoroadenosine
  modified_base 8: mod_base = um
  modified_base 9: mod_base = um
  modified_base 10: mod_base = um
  modified_base 11: mod_base = cm
  modified_base 12: mod_base = um
  modified_base 13: mod_base = um
  modified_base 14: mod_base = OTHER; note = 2'-fluorouridine
  modified_base 15: mod_base = um
  modified_base 16: mod_base = OTHER; note = 2'-fluorouridine
  modified_base 17: mod_base = OTHER; note = 2'-O-methyladenosine
  modified_base 18: mod_base = OTHER; note = 2'-O-methyladenosine
  modified_base 19: mod_base = cm
  modified_base 20: mod_base = OTHER; note = 2'-O-methyladenosine
  modified_base 21: mod_base = OTHER; note = 2'-O-methyluridine with a 3'-phosphorothioate linkage
  modified_base 22: mod_base = OTHER; note = 2'-O-methyladenosine with a 3'-phosphorothioate linkage
  modified_base 23: mod_base = OTHER; note = 2'-O-methyladenosine
tgagagatttctttttaacataa

SEQ ID NO: 322 - RNA, 23 nt, synthetic construct
  source 1..23: mol_type = other RNA
  modified_base 1: mod_base = OTHER; note = 2'-O-methyluridine with a 3'-phosphorothioate linkage
  modified_base 2: mod_base = OTHER; note = 2'-fluorouridine with a 3'-phosphorothioate linkage
  modified_base 3: mod_base = OTHER; note = 2'-O-methyladenosine
  modified_base 4: mod_base = OTHER; note = 2'-O-methyladenosine
  modified_base 5: mod_base = OTHER; note = 2'-fluoroadenosine
  modified_base 6: mod_base = um
  modified_base 7: mod_base = OTHER; note = 2'-fluoroadenosine
  modified_base 8: mod_base = cm
  modified_base 9: mod_base = um
  modified_base 10: mod_base = gm
  modified_base 11: mod_base = um
  modified_base 12: mod_base = OTHER; note = 2'-O-methyladenosine
  modified_base 13: mod_base = cm
  modified_base 14: mod_base = OTHER; note = 2'-fluorouridine
  modified_base 15: mod_base = gm
  modified_base 16: mod_base = OTHER; note = 2'-fluorouridine
  modified_base 17: mod_base = cm
  modified_base 18: mod_base = um
  modified_base 19: mod_base = um
  modified_base 20: mod_base = OTHER; note = 2'-O-methyladenosine
  modified_base 21: mod_base = OTHER; note = 2'-O-methyluridine with a 3'-phosphorothioate linkage
  modified_base 22: mod_base = OTHER; note = 2'-O-methylcytidine with a 3'-phosphorothioate linkage
  modified_base 23: mod_base = um
ttaaatactgtactgtcttatct

SEQ ID NO: 323 - RNA, 23 nt, synthetic construct
  source 1..23: mol_type = other RNA
  modified_base 1: mod_base = OTHER; note = 2'-O-methyluridine with a 3'-phosphorothioate linkage
  modified_base 2: mod_base = OTHER; note = 2'-fluorocytidine with a 3'-phosphorothioate linkage
  modified_base 3: mod_base = cm
  modified_base 4: mod_base = OTHER; note = 2'-O-methyladenosine
  modified_base 5: mod_base = OTHER; note = 2'-fluorouridine
  modified_base 6: mod_base = gm
  modified_base 7: mod_base = OTHER; note = 2'-fluorocytidine
  modified_base 8: mod_base = um
  modified_base 9: mod_base = um
  modified_base 10: mod_base = OTHER; note = 2'-O-methyladenosine
  modified_base 11: mod_base = OTHER; note = 2'-O-methyladenosine
  modified_base 12: mod_base = cm
  modified_base 13: mod_base = um
  modified_base 14: mod_base = OTHER; note = 2'-fluorouridine
  modified_base 15: mod_base = um
  modified_base 16: mod_base = OTHER; note = 2'-fluoroadenosine
  modified_base 17: mod_base = gm
  modified_base 18: mod_base = OTHER; note = 2'-O-methyladenosine
  modified_base 19: mod_base = gm
  modified_base 20: mod_base = um
  modified_base 21: mod_base = OTHER; note = 2'-O-methyluridine with a 3'-phosphorothioate linkage
  modified_base 22: mod_base = OTHER; note = 2'-O-methyladenosine with a 3'-phosphorothioate linkage
  modified_base 23: mod_base = um
tccatgcttaactttagagttat

SEQ ID NO: 324 - RNA, 23 nt, synthetic construct
  source 1..23: mol_type = other RNA
  modified_base 1: mod_base = OTHER; note = 2'-O-methyluridine with a 3'-phosphorothioate linkage
  modified_base 2: mod_base = OTHER; note = 2'-fluoroguanosine with a 3'-phosphorothioate linkage
  modified_base 3: mod_base = cm
  modified_base 4: mod_base = um
  modified_base 5: mod_base = OTHER; note = 2'-fluorouridine
  modified_base 6: mod_base = um
  modified_base 7: mod_base = OTHER; note = 2'-fluorocytidine
  modified_base 8: mod_base = OTHER; note = 2'-O-methyladenosine
  modified_base 9: mod_base = OTHER; note = 2'-O-methyladenosine
  modified_base 10: mod_base = OTHER; note = 2'-O-methyladenosine
  modified_base 11: mod_base = OTHER; note = 2'-O-methyladenosine
  modified_base 12: mod_base = um
  modified_base 13: mod_base = OTHER; note = 2'-O-methyladenosine
  modified_base 14: mod_base = OTHER; note = 2'-fluoroadenosine
  modified_base 15: mod_base = OTHER; note = 2'-O-methyladenosine
  modified_base 16: mod_base = OTHER; note = 2'-fluoroadenosine
  modified_base 17: mod_base = um
  modified_base 18: mod_base = um
  modified_base 19: mod_base = OTHER; note = 2'-O-methyladenosine
  modified_base 20: mod_base = OTHER; note = 2'-O-methyladenosine
  modified_base 21: mod_base = OTHER; note = 2'-O-methyladenosine with a 3'-phosphorothioate linkage
  modified_base 22: mod_base = OTHER; note = 2'-O-methylcytidine with a 3'-phosphorothioate linkage
  modified_base 23: mod_base = OTHER; note = 2'-O-methyladenosine
tgctttcaaaataaaattaaaca

SEQ ID NO: 325 - RNA, 23 nt, synthetic construct
  source 1..23: mol_type = other RNA
  modified_base 1: mod_base = OTHER; note = 2'-O-methyluridine with a 3'-phosphorothioate linkage
  modified_base 2: mod_base = OTHER; note = 2'-fluoroadenosine with a 3'-phosphorothioate linkage
  modified_base 3: mod_base = OTHER; note = 2'-O-methyladenosine
  modified_base 4: mod_base = OTHER; note = 2'-O-methyladenosine
  modified_base 5: mod_base = OTHER; note = 2'-fluoroadenosine
  modified_base 6: mod_base = OTHER; note = 2'-O-methyladenosine
  modified_base 7: mod_base = OTHER; note = 2'-fluorocytidine
  modified_base 8: mod_base = um
  modified_base 9: mod_base = um
  modified_base 10: mod_base = OTHER; note = 2'-O-methyladenosine
  modified_base 11: mod_base = OTHER; note = 2'-O-methyladenosine
  modified_base 12: mod_base = um
  modified_base 13: mod_base = gm
  modified_base 14: mod_base = OTHER; note = 2'-fluoroadenosine
  modified_base 15: mod_base = cm
  modified_base 16: mod_base = OTHER; note = 2'-fluorouridine
  modified_base 17: mod_base = OTHER; note = 2'-O-methyladenosine
  modified_base 18: mod_base = um
  modified_base 19: mod_base = OTHER; note = 2'-O-methyladenosine
  modified_base 20: mod_base = OTHER; note = 2'-O-methyladenosine
  modified_base 21: mod_base = OTHER; note = 2'-O-methylcytidine with a 3'-phosphorothioate linkage
  modified_base 22: mod_base = OTHER; note = 2'-O-methyladenosine with a 3'-phosphorothioate linkage
  modified_base 23: mod_base = um
taaaaacttaatgactataacat

SEQ ID NO: 326 - RNA, 23 nt, synthetic construct
  source 1..23: mol_type = other RNA
  modified_base 1: mod_base = OTHER; note = 2'-O-methyluridine with a 3'-phosphorothioate linkage
  modified_base 2: mod_base = OTHER; note = 2'-fluoroguanosine with a 3'-phosphorothioate linkage
  modified_base 3: mod_base = gm
  modified_base 4: mod_base = cm
  modified_base 5: mod_base = OTHER; note = 2'-fluoroadenosine
  modified_base 6: mod_base = OTHER; note = 2'-O-methyladenosine
  modified_base 7: mod_base = OTHER; note = 2'-fluoroadenosine
  modified_base 8: mod_base = OTHER; note = 2'-O-methyladenosine
  modified_base 9: mod_base = OTHER; note = 2'-O-methyladenosine
  modified_base 10: mod_base = cm
  modified_base 11: mod_base = OTHER; note = 2'-O-methyladenosine
  modified_base 12: mod_base = um
  modified_base 13: mod_base = um
  modified_base 14: mod_base = OTHER; note = 2'-fluorocytidine
  modified_base 15: mod_base = OTHER; note = 2'-O-methyladenosine
  modified_base 16: mod_base = OTHER; note = 2'-fluorocytidine
  modified_base 17: mod_base = OTHER; note = 2'-O-methyladenosine
  modified_base 18: mod_base = um
  modified_base 19: mod_base = OTHER; note = 2'-O-methyladenosine
  modified_base 20: mod_base = OTHER; note = 2'-O-methyladenosine
  modified_base 21: mod_base = OTHER; note = 2'-O-methyladenosine with a 3'-phosphorothioate linkage
  modified_base 22: mod_base = OTHER; note = 2'-O-methylguanosine with a 3'-phosphorothioate linkage
  modified_base 23: mod_base = gm
tggcaaaaacattcacataaagg

SEQ ID NO: 327 - RNA, 23 nt, synthetic construct
  source 1..23: mol_type = other RNA
  modified_base 1: mod_base = OTHER; note = 2'-O-methyluridine with a 3'-phosphorothioate linkage
  modified_base 2: mod_base = OTHER; note = 2'-fluorocytidine with a 3'-phosphorothioate linkage
  modified_base 3: mod_base = um
  modified_base 4: mod_base = gm
  modified_base 5: mod_base = OTHER; note = 2'-fluoroadenosine
  modified_base 6: mod_base = OTHER; note = 2'-O-methyladenosine
  modified_base 7: mod_base = OTHER; note = 2'-fluoroguanosine
  modified_base 8: mod_base = gm
  modified_base 9: mod_base = cm
  modified_base 10: mod_base = OTHER; note = 2'-O-methyladenosine
  modified_base 11: mod_base = cm
  modified_base 12: mod_base = cm
  modified_base 13: mod_base = OTHER; note = 2'-O-methyladenosine
  modified_base 14: mod_base = OTHER; note = 2'-fluorouridine
  modified_base 15: mod_base = gm
  modified_base 16: mod_base = OTHER; note = 2'-fluorouridine
  modified_base 17: mod_base = cm
  modified_base 18: mod_base = OTHER; note = 2'-O-methyladenosine
  modified_base 19: mod_base = um
  modified_base 20: mod_base = OTHER; note = 2'-O-methyladenosine
  modified_base 21: mod_base = OTHER; note = 2'-O-methyladenosine with a 3'-phosphorothioate linkage
  modified_base 22: mod_base = OTHER; note = 2'-O-methyluridine with a 3'-phosphorothioate linkage
  modified_base 23: mod_base = OTHER; note = 2'-O-methyladenosine
tctgaaggcaccatgtcataata

SEQ ID NO: 328 - RNA, 23 nt, synthetic construct
  source 1..23: mol_type = other RNA
  modified_base 1: mod_base = OTHER; note = 2'-O-methyluridine with a 3'-phosphorothioate linkage
  modified_base 2: mod_base = OTHER; note = 2'-fluoroguanosine with a 3'-phosphorothioate linkage
  modified_base 3: mod_base = gm
  modified_base 4: mod_base = cm
  modified_base 5: mod_base = OTHER; note = 2'-fluorouridine
  modified_base 6: mod_base = um
  modified_base 7: mod_base = OTHER; note = 2'-fluorouridine
  modified_base 8: mod_base = gm
  modified_base 9: mod_base = cm
  modified_base 10: mod_base = OTHER; note = 2'-O-methyladenosine
  modified_base 11: mod_base = gm
  modified_base 12: mod_base = um
  modified_base 13: mod_base = cm
  modified_base 14: mod_base = OTHER; note = 2'-fluorouridine
  modified_base 15: mod_base = um
  modified_base 16: mod_base = OTHER; note = 2'-fluorocytidine
  modified_base 17: mod_base = um
  modified_base 18: mod_base = um
  modified_base 19: mod_base = um
  modified_base 20: mod_base = gm
  modified_base 21: mod_base = OTHER; note = 2'-O-methyladenosine with a 3'-phosphorothioate linkage
  modified_base 22: mod_base = OTHER; note = 2'-O-methylcytidine with a 3'-phosphorothioate linkage
  modified_base 23: mod_base = OTHER; note = 2'-O-methyladenosine
tggctttgcagtcttctttgaca

SEQ ID NO: 329 - RNA, 23 nt, synthetic construct
  source 1..23: mol_type = other RNA
  modified_base 1: mod_base = OTHER; note = 2'-O-methyluridine with a 3'-phosphorothioate linkage
  modified_base 2: mod_base = OTHER; note = 2'-fluoroadenosine with a 3'-phosphorothioate linkage
  modified_base 3: mod_base = cm
  modified_base 4: mod_base = um
  modified_base 5: mod_base = OTHER; note = 2'-fluorouridine
  modified_base 6: mod_base = um
  modified_base 7: mod_base = OTHER; note = 2'-fluoroadenosine
  modified_base 8: mod_base = gm
  modified_base 9: mod_base = OTHER; note = 2'-O-methyladenosine
  modified_base 10: mod_base = gm
  modified_base 11: mod_base = um
  modified_base 12: mod_base = um
  modified_base 13: mod_base = OTHER; note = 2'-O-methyladenosine
  modified_base 14: mod_base = OTHER; note = 2'-fluorouridine
  modified_base 15: mod_base = cm
  modified_base 16: mod_base = OTHER; note = 2'-fluorouridine
  modified_base 17: mod_base = um
  modified_base 18: mod_base = um
  modified_base 19: mod_base = um
  modified_base 20: mod_base = cm
  modified_base 21: mod_base = OTHER; note = 2'-O-methyladenosine with a 3'-phosphorothioate linkage
  modified_base 22: mod_base = OTHER; note = 2'-O-methyluridine with a 3'-phosphorothioate linkage
  modified_base 23: mod_base = gm
tactttagagttatcttttcatg

SEQ ID NO: 330 - RNA, 23 nt, synthetic construct
  source 1..23: mol_type = other RNA
  modified_base 1: mod_base = OTHER; note = 2'-O-methyluridine with a 3'-phosphorothioate linkage
  modified_base 2: mod_base = OTHER; note = 2'-fluoroguanosine with a 3'-phosphorothioate linkage
  modified_base 3: mod_base = um
  modified_base 4: mod_base = gm
  modified_base 5: mod_base = OTHER; note = 2'-fluorocytidine
  modified_base 6: mod_base = um
  modified_base 7: mod_base = OTHER; note = 2'-fluorocytidine
  modified_base 8: mod_base = um
  modified_base 9: mod_base = um
  modified_base 10: mod_base = gm
  modified_base 11: mod_base = gm
  modified_base 12: mod_base = um
  modified_base 13: mod_base = um
  modified_base 14: mod_base = OTHER; note = 2'-fluorocytidine
  modified_base 15: mod_base = OTHER; note = 2'-O-methyladenosine
  modified_base 16: mod_base = OTHER; note = 2'-fluoroadenosine
  modified_base 17: mod_base = gm
  modified_base 18: mod_base = um
  modified_base 19: mod_base = OTHER; note = 2'-O-methyladenosine
  modified_base 20: mod_base = OTHER; note = 2'-O-methyladenosine
  modified_base 21: mod_base = OTHER; note = 2'-O-methyladenosine with a 3'-phosphorothioate linkage
  modified_base 22: mod_base = OTHER; note = 2'-O-methyladenosine with a 3'-phosphorothioate linkage
  modified_base 23: mod_base = um
tgtgctcttggttcaagtaaaat

SEQ ID NO: 331 - RNA, 23 nt, synthetic construct
  source 1..23: mol_type = other RNA
  modified_base 1: mod_base = OTHER; note = 2'-O-methyluridine with a 3'-phosphorothioate linkage
  modified_base 2: mod_base = OTHER; note = 2'-fluorouridine with a 3'-phosphorothioate linkage
  modified_base 3: mod_base = um
  modified_base 4: mod_base = OTHER; note = 2'-O-methyladenosine
  modified_base 5: mod_base = OTHER; note = 2'-fluoroadenosine
  modified_base 6: mod_base = OTHER; note = 2'-O-methyladenosine
  modified_base 7: mod_base = OTHER; note = 2'-fluorouridine
  modified_base 8: mod_base = OTHER; note = 2'-O-methyladenosine
  modified_base 9: mod_base = OTHER; note = 2'-O-methyladenosine
  modified_base 10: mod_base = OTHER; note = 2'-O-methyladenosine
  modified_base 11: mod_base = OTHER; note = 2'-O-methyladenosine
  modified_base 12: mod_base = OTHER; note = 2'-O-methyladenosine
  modified_base 13: mod_base = gm
  modified_base 14: mod_base = OTHER; note = 2'-fluoroadenosine
  modified_base 15: mod_base = um
  modified_base 16: mod_base = OTHER; note = 2'-fluoroguanosine
  modified_base 17: mod_base = OTHER; note = 2'-O-methyladenosine
  modified_base 18: mod_base = gm
  modified_base 19: mod_base = um
  modified_base 20: mod_base = um
  modified_base 21: mod_base = OTHER; note = 2'-O-methylguanosine with a 3'-phosphorothioate linkage
  modified_base 22: mod_base = OTHER; note = 2'-O-methyladenosine with a 3'-phosphorothioate linkage
  modified_base 23: mod_base = gm
tttaaataaaaagatgagttgag

SEQ ID NO: 332 - RNA, 23 nt, synthetic construct
  source 1..23: mol_type = other RNA
  modified_base 1: mod_base = OTHER; note = 2'-O-methyluridine with a 3'-phosphorothioate linkage
  modified_base 2: mod_base = OTHER; note = 2'-fluorouridine with a 3'-phosphorothioate linkage
  modified_base 3: mod_base = um
  modified_base 4: mod_base = um
  modified_base 5: mod_base = OTHER; note = 2'-fluoroadenosine
  modified_base 6: mod_base = OTHER; note = 2'-O-methyladenosine
  modified_base 7: mod_base = OTHER; note = 2'-fluorocytidine
  modified_base 8: mod_base = OTHER; note = 2'-O-methyladenosine
  modified_base 9: mod_base = um
  modified_base 10: mod_base = OTHER; note = 2'-O-methyladenosine
  modified_base 11: mod_base = OTHER; note = 2'-O-methyladenosine
  modified_base 12: mod_base = um
  modified_base 13: mod_base = um
  modified_base 14: mod_base = OTHER; note = 2'-fluoroadenosine
  modified_base 15: mod_base = um
  modified_base 16: mod_base = OTHER; note = 2'-fluorocytidine
  modified_base 17: mod_base = OTHER; note = 2'-O-methyladenosine
  modified_base 18: mod_base = um
  modified_base 19: mod_base = cm
  modified_base 20: mod_base = OTHER; note = 2'-O-methyladenosine
  modified_base 21: mod_base = OTHER; note = 2'-O-methyluridine with a 3'-phosphorothioate linkage
  modified_base 22: mod_base = OTHER; note = 2'-O-methyluridine with a 3'-phosphorothioate linkage
  modified_base 23: mod_base = OTHER; note = 2'-O-methyladenosine
ttttaacataattatcatcatta

SEQ ID NO: 333 - RNA, 23 nt, synthetic construct
  source 1..23: mol_type = other RNA
  modified_base 1: mod_base = OTHER; note = 2'-O-methyluridine with a 3'-phosphorothioate linkage
  modified_base 2: mod_base = OTHER; note = 2'-fluorouridine with a 3'-phosphorothioate linkage
  modified_base 3: mod_base = um
  modified_base 4: mod_base = um
  modified_base 5: mod_base = OTHER; note = 2'-fluorouridine
  modified_base 6: mod_base = OTHER; note = 2'-O-methyladenosine
  modified_base 7: mod_base = OTHER; note = 2'-fluorouridine
  modified_base 8: mod_base = OTHER; note = 2'-O-methyladenosine
  modified_base 9: mod_base = cm
  modified_base 10: mod_base = um
  modified_base 11: mod_base = um
  modified_base 12: mod_base = um
  modified_base 13: mod_base = um
  modified_base 14: mod_base = OTHER; note = 2'-fluoroguanosine
  modified_base 15: mod_base = um
  modified_base 16: mod_base = OTHER; note = 2'-fluoroadenosine
  modified_base 17: mod_base = OTHER; note = 2'-O-methyladenosine
  modified_base 18: mod_base = um
  modified_base 19: mod_base = OTHER; note = 2'-O-methyladenosine
  modified_base 20: mod_base = um
  modified_base 21: mod_base = OTHER; note = 2'-O-methyladenosine with a 3'-phosphorothioate linkage
  modified_base 22: mod_base = OTHER; note = 2'-O-methyluridine with a 3'-phosphorothioate linkage
  modified_base 23: mod_base = um
tttttatacttttgtaatatatt

SEQ ID NO: 334 - RNA, 23 nt, synthetic construct
  source 1..23: mol_type = other RNA
  modified_base 1: mod_base = OTHER; note = 2'-O-methyluridine with a 3'-phosphorothioate linkage
  modified_base 2: mod_base = OTHER; note = 2'-fluoroadenosine with a 3'-phosphorothioate linkage
  modified_base 3: mod_base = um
  modified_base 4: mod_base = gm
  modified_base 5: mod_base = OTHER; note = 2'-fluorocytidine
  modified_base 6: mod_base = um
  modified_base 7: mod_base = OTHER; note = 2'-fluoroadenosine
  modified_base 8: mod_base = OTHER; note = 2'-O-methyladenosine
  modified_base 9: mod_base = cm
  modified_base 10: mod_base = OTHER; note = 2'-O-methyladenosine
  modified_base 11: mod_base = um
  modified_base 12: mod_base = gm
  modified_base 13: mod_base = um
  modified_base 14: mod_base = OTHER; note = 2'-fluoroadenosine
  modified_base 15: mod_base = cm
  modified_base 16: mod_base = OTHER; note = 2'-fluorouridine
  modified_base 17: mod_base = OTHER; note = 2'-O-methyladenosine
  modified_base 18: mod_base = um
  modified_base 19: mod_base = cm
  modified_base 20: mod_base = OTHER; note = 2'-O-methyladenosine
  modified_base 21: mod_base = OTHER; note = 2'-O-methylcytidine with a 3'-phosphorothioate linkage
  modified_base 22: mod_base = OTHER; note = 2'-O-methyluridine with a 3'-phosphorothioate linkage
  modified_base 23: mod_base = um
tatgctaacatgtactatcactt

SEQ ID NO: 335 - RNA, 23 nt, synthetic construct
  source 1..23: mol_type = other RNA
  modified_base 1: mod_base = OTHER; note = 2'-O-methyluridine with a 3'-phosphorothioate linkage
  modified_base 2: mod_base = OTHER; note = 2'-fluoroadenosine with a 3'-phosphorothioate linkage
  modified_base 3: mod_base = cm
  modified_base 4: mod_base = cm
  modified_base 5: mod_base = OTHER; note = 2'-fluoroadenosine
  modified_base 6: mod_base = um
  modified_base 7: mod_base = OTHER; note = 2'-fluoroguanosine
  modified_base 8: mod_base = um
  modified_base 9: mod_base = cm
  modified_base 10: mod_base = OTHER; note = 2'-O-methyladenosine
  modified_base 11: mod_base = um
  modified_base 12: mod_base = OTHER; note = 2'-O-methyladenosine
  modified_base 13: mod_base = OTHER; note = 2'-O-methyladenosine
  modified_base 14: mod_base = OTHER; note = 2'-fluorouridine
  modified_base 15: mod_base = OTHER; note = 2'-O-methyladenosine
  modified_base 16: mod_base = OTHER; note = 2'-fluoroadenosine
  modified_base 17: mod_base = gm
  modified_base 18: mod_base = gm
  modified_base 19: mod_base = cm
  modified_base 20: mod_base = OTHER; note = 2'-O-methyladenosine
  modified_base 21: mod_base = OTHER; note = 2'-O-methyladenosine with a 3'-phosphorothioate linkage
  modified_base 22: mod_base = OTHER; note = 2'-O-methyluridine with a 3'-phosphorothioate linkage
  modified_base 23: mod_base = um
taccatgtcataataaggcaatt

SEQ ID NO: 336 - RNA, 23 nt, synthetic construct
  source 1..23: mol_type = other RNA
  modified_base 1: mod_base = OTHER; note = 2'-O-methyluridine with a 3'-phosphorothioate linkage
  modified_base 2: mod_base = OTHER; note = 2'-fluorouridine with a 3'-phosphorothioate linkage
  modified_base 3: mod_base = cm
  modified_base 4: mod_base = OTHER; note = 2'-O-methyladenosine
  modified_base 5: mod_base = OTHER; note = 2'-fluoroadenosine
  modified_base 6: mod_base = OTHER; note = 2'-O-methyladenosine
  modified_base 7: mod_base = OTHER; note = 2'-fluoroadenosine
  modified_base 8: mod_base = um
  modified_base 9: mod_base = OTHER; note = 2'-O-methyladenosine
  modified_base 10: mod_base = cm
  modified_base 11: mod_base = OTHER; note = 2'-O-methyladenosine
  modified_base 12: mod_base = um
  modified_base 13: mod_base = um
  modified_base 14: mod_base = OTHER; note = 2'-fluoroadenosine
  modified_base 15: mod_base = um
  modified_base 16: mod_base = OTHER; note = 2'-fluoroadenosine
  modified_base 17: mod_base = um
  modified_base 18: mod_base = gm
  modified_base 19: mod_base = cm
  modified_base 20: mod_base = um
  modified_base 21: mod_base = OTHER; note = 2'-O-methyladenosine with a 3'-phosphorothioate linkage
  modified_base 22: mod_base = OTHER; note = 2'-O-methyladenosine with a 3'-phosphorothioate linkage
  modified_base 23: mod_base = cm
ttcaaaatacattatatgctaac

SEQ ID NO: 337 - RNA, 23 nt, synthetic construct
  source 1..23: mol_type = other RNA
  modified_base 1: mod_base = OTHER; note = 2'-O-methyluridine with a 3'-phosphorothioate linkage
  modified_base 2: mod_base = OTHER; note = 2'-fluorocytidine with a 3'-phosphorothioate linkage
  modified_base 3: mod_base = um
  modified_base 4: mod_base = OTHER; note = 2'-O-methyladenosine
  modified_base 5: mod_base = OTHER; note = 2'-fluorouridine
  modified_base 6: mod_base = gm
  modified_base 7: mod_base = OTHER; note = 2'-fluoroadenosine
  modified_base 8: mod_base = gm
  modified_base 9: mod_base = OTHER; note = 2'-O-methyladenosine
  modified_base 10: mod_base = OTHER; note = 2'-O-methyladenosine
  modified_base 11: mod_base = OTHER; note = 2'-O-methyladenosine
  modified_base 12: mod_base = OTHER; note = 2'-O-methyladenosine
  modified_base 13: mod_base = um
  modified_base 14: mod_base = OTHER; note = 2'-fluoroadenosine
  modified_base 15: mod_base = cm
  modified_base 16: mod_base = OTHER; note = 2'-fluoroadenosine
  modified_base 17: mod_base = gm
  modified_base 18: mod_base = OTHER; note = 2'-O-methyladenosine
  modified_base 19: mod_base = OTHER; note = 2'-O-methyladenosine
  modified_base 20: mod_base = gm
  modified_base 21: mod_base = OTHER; note = 2'-O-methyluridine with a 3'-phosphorothioate linkage
  modified_base 22: mod_base = OTHER; note = 2'-O-methyladenosine with a 3'-phosphorothioate linkage
  modified_base 23: mod_base = um
tctatgagaaaatacagaagtat

SEQ ID NO: 338 - RNA, 23 nt, synthetic construct
  source 1..23: mol_type = other RNA
  modified_base 1: mod_base = OTHER; note = 2'-O-methyluridine with a 3'-phosphorothioate linkage
  modified_base 2: mod_base = OTHER; note = 2'-fluoroguanosine with a 3'-phosphorothioate linkage
  modified_base 3: mod_base = um
  modified_base 4: mod_base = um
  modified_base 5: mod_base = OTHER; note = 2'-fluorouridine
  modified_base 6: mod_base = gm
  modified_base 7: mod_base = OTHER; note = 2'-fluoroadenosine
  modified_base 8: mod_base = OTHER; note = 2'-O-methyladenosine
  modified_base 9: mod_base = gm
  modified_base 10: mod_base = OTHER; note = 2'-O-methyladenosine
  modified_base 11: mod_base = OTHER; note = 2'-O-methyladenosine
  modified_base 12: mod_base = um
  modified_base 13: mod_base = cm
  modified_base 14: mod_base = OTHER; note = 2'-fluoroadenosine
  modified_base 15: mod_base = cm
  modified_base 16: mod_base = OTHER; note = 2'-fluoroadenosine
  modified_base 17: mod_base = cm
  modified_base 18: mod_base = OTHER; note = 2'-O-methyladenosine
  modified_base 19: mod_base = OTHER; note = 2'-O-methyladenosine
  modified_base 20: mod_base = OTHER; note = 2'-O-methyladenosine
  modified_base 21: mod_base = OTHER; note = 2'-O-methyladenosine with a 3'-phosphorothioate linkage
  modified_base 22: mod_base = OTHER; note = 2'-O-methylguanosine with a 3'-phosphorothioate linkage
  modified_base 23: mod_base = OTHER; note = 2'-O-methyladenosine
tgtttgaagaatcacacaaaaga

SEQ ID NO: 339 - RNA, 23 nt, synthetic construct
  source 1..23: mol_type = other RNA
  modified_base 1: mod_base = OTHER; note = 2'-O-methyluridine with a 3'-phosphorothioate linkage
  modified_base 2: mod_base = OTHER; note = 2'-fluorouridine with a 3'-phosphorothioate linkage
  modified_base 3: mod_base = gm
  modified_base 4: mod_base = cm
  modified_base 5: mod_base = OTHER; note = 2'-fluorocytidine
  modified_base 6: mod_base = cm
  modified_base 7: mod_base = OTHER; note = 2'-fluoroadenosine
  modified_base 8: mod_base = um
  modified_base 9: mod_base = gm
  modified_base 10: mod_base = cm
  modified_base 11: mod_base = um
  modified_base 12: mod_base = um
  modified_base 13: mod_base = OTHER; note = 2'-O-methyladenosine
  modified_base 14: mod_base = OTHER; note = 2'-fluoroadenosine
  modified_base 15: mod_base = cm
  modified_base 16: mod_base = OTHER; note = 2'-fluorouridine
  modified_base 17: mod_base = um
  modified_base 18: mod_base = um
  modified_base 19: mod_base = OTHER; note = 2'-O-methyladenosine
  modified_base 20: mod_base = gm
  modified_base 21: mod_base = OTHER; note = 2'-O-methyladenosine with a 3'-phosphorothioate linkage
  modified_base 22: mod_base = OTHER; note = 2'-O-methylguanosine with a 3'-phosphorothioate linkage
  modified_base 23: mod_base = um
ttgcccatgcttaactttagagt

SEQ ID NO: 340 - RNA, 23 nt, synthetic construct
  source 1..23: mol_type = other RNA
  modified_base 1: mod_base = OTHER; note = 2'-O-methyluridine with a 3'-phosphorothioate linkage
  modified_base 2: mod_base = OTHER; note = 2'-fluoroguanosine with a 3'-phosphorothioate linkage
  modified_base 3: mod_base = gm
  modified_base 4: mod_base = OTHER; note = 2'-O-methyladenosine
  modified_base 5: mod_base = OTHER; note = 2'-fluorouridine
  modified_base 6: mod_base = cm
  modified_base 7: mod_base = OTHER; note = 2'-fluorouridine
  modified_base 8: mod_base = gm
  modified_base 9: mod_base = OTHER; note = 2'-O-methyladenosine
  modified_base 10: mod_base = OTHER; note = 2'-O-methyladenosine
  modified_base 11: mod_base = gm
  modified_base 12: mod_base = gm
  modified_base 13: mod_base = cm
  modified_base 14: mod_base = OTHER; note = 2'-fluoroadenosine
  modified_base 15: mod_base = cm
  modified_base 16: mod_base = OTHER; note = 2'-fluorocytidine
  modified_base 17: mod_base = OTHER; note = 2'-O-methyladenosine
  modified_base 18: mod_base = um
  modified_base 19: mod_base = gm
  modified_base 20: mod_base = um
  modified_base 21: mod_base = OTHER; note = 2'-O-methylcytidine with a 3'-phosphorothioate linkage
  modified_base 22: mod_base = OTHER; note = 2'-O-methyladenosine with a 3'-phosphorothioate linkage
  modified_base 23: mod_base = um
tggatctgaaggcaccatgtcat

SEQ ID NO: 341 - RNA, 23 nt, synthetic construct
  source 1..23: mol_type = other RNA
  modified_base 1: mod_base = OTHER; note = 2'-O-methyluridine with a 3'-phosphorothioate linkage
  modified_base 2: mod_base = OTHER; note = 2'-fluorocytidine with a 3'-phosphorothioate linkage
  modified_base 3: mod_base = gm
  modified_base 4: mod_base = OTHER; note = 2'-O-methyladenosine
  modified_base 5: mod_base = OTHER; note = 2'-fluoroadenosine
  modified_base 6: mod_base = gm
  modified_base 7: mod_base = OTHER; note = 2'-fluoroadenosine
  modified_base 8: mod_base = gm
  modified_base 9: mod_base = cm
  modified_base 10: mod_base = OTHER; note = 2'-O-methyladenosine
  modified_base 11: mod_base = gm
  modified_base 12: mod_base = um
  modified_base 13: mod_base = um
  modified_base 14: mod_base = OTHER; note = 2'-fluoroadenosine
  modified_base 15: mod_base = gm
  modified_base 16: mod_base = OTHER; note = 2'-fluoroguanosine
  modified_base 17: mod_base = cm
  modified_base 18: mod_base = gm
  modified_base 19: mod_base = gm
  modified_base 20: mod_base = gm
  modified_base 21: mod_base = OTHER; note = 2'-O-methylcytidine with a 3'-phosphorothioate linkage
  modified_base 22: mod_base = OTHER; note = 2'-O-methylcytidine with a 3'-phosphorothioate linkage
  modified_base 23: mod_base = gm
tcgaagagcagttaggcgggccg

SEQ ID NO: 342 - RNA, 23 nt, synthetic construct
  source 1..23: mol_type = other RNA
  modified_base 1: mod_base = OTHER; note = 2'-O-methyluridine with a 3'-phosphorothioate linkage
  modified_base 2: mod_base = OTHER; note = 2'-fluorouridine with a 3'-phosphorothioate linkage
  modified_base 3: mod_base = um
  modified_base 4: mod_base = cm
  modified_base 5: mod_base = OTHER; note = 2'-fluoroadenosine
  modified_base 6: mod_base = cm
  modified_base 7: mod_base = OTHER; note = 2'-fluorouridine
  modified_base 8: mod_base = OTHER; note = 2'-O-methyladenosine
  modified_base 9: mod_base = OTHER; note = 2'-O-methyladenosine
  modified_base 10: mod_base = gm
  modified_base 11: mod_base = OTHER; note = 2'-O-methyladenosine
  modified_base 12: mod_base = um
  modified_base 13: mod_base = OTHER; note = 2'-O-methyladenosine
  modified_base 14: mod_base = OTHER; note = 2'-fluorouridine
  modified_base 15: mod_base = um
  modified_base 16: mod_base = OTHER; note = 2'-fluorocytidine
  modified_base 17: mod_base = um
  modified_base 18: mod_base = um
  modified_base 19: mod_base = um
  modified_base 20: mod_base = gm
  modified_base 21: mod_base = OTHER; note = 2'-O-methyladenosine with a 3'-phosphorothioate linkage
  modified_base 22: mod_base = OTHER; note = 2'-O-methyluridine with a 3'-phosphorothioate linkage
  modified_base 23: mod_base = um
tttcactaagatattctttgatt

SEQ ID NO: 343 - RNA, 23 nt, synthetic construct
  source 1..23: mol_type = other RNA
  modified_base 1: mod_base = OTHER; note = 2'-O-methyluridine with a 3'-phosphorothioate linkage
  modified_base 2: mod_base = OTHER; note = 2'-fluorouridine with a 3'-phosphorothioate linkage
  modified_base 3: mod_base = um
  modified_base 4: mod_base = gm
  modified_base 5: mod_base = OTHER; note = 2'-fluorocytidine
  modified_base 6: mod_base = cm
  modified_base 7: mod_base = OTHER; note = 2'-fluoroadenosine
  modified_base 8: mod_base = cm
  modified_base 9: mod_base = um
  modified_base 10: mod_base = gm
  modified_base 11: mod_base = gm
  modified_base 12: mod_base = um
  modified_base 13: mod_base = um
  modified_base 14: mod_base = OTHER; note = 2'-fluorouridine
  modified_base 15: mod_base = gm
  modified_base 16: mod_base = OTHER; note = 2'-fluoroguanosine
  modified_base 17: mod_base = gm
  modified_base 18: mod_base = OTHER; note = 2'-O-methyladenosine
  modified_base 19: mod_base = um
  modified_base 20: mod_base = OTHER; note = 2'-O-methyladenosine
  modified_base 21: mod_base = OTHER; note = 2'-O-methylcytidine with a 3'-phosphorothioate linkage
  modified_base 22: mod_base = OTHER; note = 2'-O-methyluridine with a 3'-phosphorothioate linkage
  modified_base 23: mod_base = um
tttgccactggtttgggatactt

SEQ ID NO: 344 - RNA, 23 nt, synthetic construct
  source 1..23: mol_type = other RNA
  modified_base 1: mod_base = OTHER; note = 2'-O-methyluridine with a 3'-phosphorothioate linkage
  modified_base 2: mod_base = OTHER; note = 2'-fluorocytidine with a 3'-phosphorothioate linkage
  modified_base 3: mod_base = cm
  modified_base 4: mod_base = OTHER; note = 2'-O-methyladenosine
  modified_base 5: mod_base = OTHER; note = 2'-fluorocytidine
  modified_base 6: mod_base = OTHER; note = 2'-O-methyladenosine
  modified_base 7: mod_base = OTHER; note = 2'-fluoroadenosine
  modified_base 8: mod_base = OTHER; note = 2'-O-methyladenosine
  modified_base 9: mod_base = um
  modified_base 10: mod_base = OTHER; note = 2'-O-methyladenosine
  modified_base 11: mod_base = um
  modified_base 12: mod_base = cm
  modified_base 13: mod_base = OTHER; note = 2'-O-methyladenosine
  modified_base 14: mod_base = OTHER; note = 2'-fluorouridine
  modified_base 15: mod_base = OTHER; note = 2'-O-methyladenosine
  modified_base 16: mod_base = OTHER; note = 2'-fluoroadenosine
  modified_base 17: mod_base = um
  modified_base 18: mod_base = OTHER; note = 2'-O-methyladenosine
  modified_base 19: mod_base = OTHER; note = 2'-O-methyladenosine
  modified_base 20: mod_base = OTHER; note = 2'-O-methyladenosine
  modified_base 21: mod_base = OTHER; note = 2'-O-methyladenosine with a 3'-phosphorothioate linkage
  modified_base 22: mod_base = OTHER; note = 2'-O-methylguanosine with a 3'-phosphorothioate linkage
  modified_base 23: mod_base = OTHER; note = 2'-O-methyladenosine
tccacaaatatcataataaaaga

SEQ ID NO: 345 - RNA, 23 nt, synthetic construct
  source 1..23: mol_type = other RNA
  modified_base 1: mod_base = OTHER; note = 2'-O-methyluridine with a 3'-phosphorothioate linkage
  modified_base 2: mod_base = OTHER; note = 2'-fluoroadenosine with a 3'-phosphorothioate linkage
  modified_base 3: mod_base = gm
  modified_base 4: mod_base = cm
  modified_base 5: mod_base = OTHER; note = 2'-fluoroadenosine
  modified_base 6: mod_base = OTHER; note = 2'-O-methyladenosine
  modified_base 7: mod_base = OTHER; note = 2'-fluorouridine
  modified_base 8: mod_base = cm
  modified_base 9: mod_base = cm
  modified_base 10: mod_base = OTHER; note = 2'-O-methyladenosine
  modified_base 11: mod_base = gm
  modified_base 12: mod_base = um
  modified_base 13: mod_base = um
  modified_base 14: mod_base = OTHER; note = 2'-fluorouridine
  modified_base 15: mod_base = OTHER; note = 2'-O-methyladenosine
  modified_base 16: mod_base = OTHER; note = 2'-fluoroadenosine
  modified_base 17: mod_base = OTHER; note = 2'-O-methyladenosine
  modified_base 18: mod_base = OTHER; note = 2'-O-methyladenosine
  modified_base 19: mod_base = OTHER; note = 2'-O-methyladenosine
  modified_base 20: mod_base = OTHER; note = 2'-O-methyladenosine
  modified_base 21: mod_base = OTHER; note = 2'-O-methyladenosine with a 3'-phosphorothioate linkage
  modified_base 22: mod_base = OTHER; note = 2'-O-methyladenosine with a 3'-phosphorothioate linkage
  modified_base 23: mod_base = OTHER; note = 2'-O-methyladenosine
tagcaatccagtttaaaaaaaaa

SEQ ID NO: 346 - RNA, 23 nt, synthetic construct
  source 1..23: mol_type = other RNA
  modified_base 1: mod_base = OTHER; note = 2'-O-methyluridine with a 3'-phosphorothioate linkage
  modified_base 2: mod_base = OTHER; note = 2'-fluoroguanosine with a 3'-phosphorothioate linkage
  modified_base 3: mod_base = OTHER; note = 2'-O-methyladenosine
  modified_base 4: mod_base = OTHER; note = 2'-O-methyladenosine
  modified_base 5: mod_base = OTHER; note = 2'-fluoroguanosine
  modified_base 6: mod_base = OTHER; note = 2'-O-methyladenosine
  modified_base 7: mod_base = OTHER; note = 2'-fluoroadenosine
  modified_base 8: mod_base = um
  modified_base 9: mod_base = cm
  modified_base 10: mod_base = OTHER; note = 2'-O-methyladenosine
  modified_base 11: mod_base = cm
  modified_base 12: mod_base = OTHER; note = 2'-O-methyladenosine
  modified_base 13: mod_base = cm
  modified_base 14: mod_base = OTHER; note = 2'-fluoroadenosine
  modified_base 15: mod_base = OTHER; note = 2'-O-methyladenosine
  modified_base 16: mod_base = OTHER; note = 2'-fluoroadenosine
  modified_base 17: mod_base = OTHER; note = 2'-O-methyladenosine
  modified_base 18: mod_base = gm
  modified_base 19: mod_base = OTHER; note = 2'-O-methyladenosine
  modified_base 20: mod_base = cm
  modified_base 21: mod_base = OTHER; note = 2'-O-methyladenosine with a 3'-phosphorothioate linkage
  modified_base 22: mod_base = OTHER; note = 2'-O-methyluridine with a 3'-phosphorothioate linkage
  modified_base 23: mod_base = OTHER; note = 2'-O-methyladenosine
tgaagaatcacacaaaagacata

SEQ ID NO: 347 - RNA, 23 nt, synthetic construct
  source 1..23: mol_type = other RNA
  modified_base 1: mod_base = OTHER; note = 2'-O-methyluridine with a 3'-phosphorothioate linkage
  modified_base 2: mod_base = OTHER; note = 2'-fluoroguanosine with a 3'-phosphorothioate linkage
  modified_base 3: mod_base = cm
  modified_base 4: mod_base = cm
  modified_base 5: mod_base = OTHER; note = 2'-fluorocytidine
  modified_base 6: mod_base = OTHER; note = 2'-O-methyladenosine
  modified_base 7: mod_base = OTHER; note = 2'-fluorouridine
  modified_base 8: mod_base = gm
  modified_base 9: mod_base = cm
  modified_base 10: mod_base = um
  modified_base 11: mod_base = um
  modified_base 12: mod_base = OTHER; note = 2'-O-methyladenosine
  modified_base 13: mod_base = OTHER; note = 2'-O-methyladenosine
  modified_base 14: mod_base = OTHER; note = 2'-fluorocytidine
  modified_base 15: mod_base = um
  modified_base 16: mod_base = OTHER; note = 2'-fluorouridine
  modified_base 17: mod_base = um
  modified_base 18: mod_base = OTHER; note = 2'-O-methyladenosine
  modified_base 19: mod_base = gm
  modified_base 20: mod_base = OTHER; note = 2'-O-methyladenosine
  modified_base 21: mod_base = OTHER; note = 2'-O-methylguanosine with a 3'-phosphorothioate linkage
  modified_base 22: mod_base = OTHER; note = 2'-O-methyluridine with a 3'-phosphorothioate linkage
  modified_base 23: mod_base = um
tgcccatgcttaactttagagtt

SEQ ID NO: 348 - RNA, 23 nt, synthetic construct
  source 1..23: mol_type = other RNA
  modified_base 1: mod_base = OTHER; note = 2'-O-methyluridine with a 3'-phosphorothioate linkage
  modified_base 2: mod_base = OTHER; note = 2'-fluorouridine with a 3'-phosphorothioate linkage
  modified_base 3: mod_base = gm
  modified_base 4: mod_base = cm
  modified_base 5: mod_base = OTHER; note = 2'-fluorouridine
  modified_base 6: mod_base = cm
  modified_base 7: mod_base = OTHER; note = 2'-fluorouridine
  modified_base 8: mod_base = um
  modified_base 9: mod_base = gm
  modified_base 10: mod_base = gm
  modified_base 11: mod_base = um
  modified_base 12: mod_base = um
  modified_base 13: mod_base = cm
  modified_base 14: mod_base = OTHER; note = 2'-fluoroadenosine
  modified_base 15: mod_base = OTHER; note = 2'-O-methyladenosine
  modified_base 16: mod_base = OTHER; note = 2'-fluoroguanosine
  modified_base 17: mod_base = um
  modified_base 18: mod_base = OTHER; note = 2'-O-methyladenosine
  modified_base 19: mod_base = OTHER; note = 2'-O-methyladenosine
  modified_base 20: mod_base = OTHER; note = 2'-O-methyladenosine
  modified_base 21: mod_base = OTHER; note = 2'-O-methyladenosine with a 3'-phosphorothioate linkage
  modified_base 22: mod_base = OTHER; note = 2'-O-methyluridine with a 3'-phosphorothioate linkage
  modified_base 23: mod_base = OTHER; note = 2'-O-methyladenosine
ttgctcttggttcaagtaaaata

SEQ ID NO: 349 - RNA, 23 nt, synthetic construct
  source 1..23: mol_type = other RNA
  modified_base 1: mod_base = OTHER; note = 2'-O-methyluridine with a 3'-phosphorothioate linkage
  modified_base 2: mod_base = OTHER; note = 2'-fluorouridine with a 3'-phosphorothioate linkage
  modified_base 3: mod_base = OTHER; note = 2'-O-methyladenosine
  modified_base 4: mod_base = um
  modified_base 5: mod_base = OTHER; note = 2'-fluorocytidine
  modified_base 6: mod_base = OTHER; note = 2'-O-methyladenosine
  modified_base 7: mod_base = OTHER; note = 2'-fluorouridine
  modified_base 8: mod_base = cm
  modified_base 9: mod_base = OTHER; note = 2'-O-methyladenosine
  modified_base 10: mod_base = OTHER; note = 2'-O-methyladenosine
  modified_base 11: mod_base = gm
  modified_base 12: mod_base = cm
  modified_base 13: mod_base = OTHER; note = 2'-O-methyladenosine
  modified_base 14: mod_base = OTHER; note = 2'-fluorouridine
  modified_base 15: mod_base = um
  modified_base 16: mod_base = OTHER; note = 2'-fluorouridine
  modified_base 17: mod_base = cm
  modified_base 18: mod_base = OTHER; note = 2'-O-methyladenosine
  modified_base 19: mod_base = gm
  modified_base 20: mod_base = gm
  modified_base 21: mod_base = OTHER; note = 2'-O-methyladenosine with a 3'-phosphorothioate linkage
  modified_base 22: mod_base = OTHER; note = 2'-O-methylguanosine with a 3'-phosphorothioate linkage
  modified_base 23: mod_base = cm
ttatcatcaagcatttcaggagc

SEQ ID NO: 350 - RNA, 23 nt, synthetic construct
  source 1..23: mol_type = other RNA
  modified_base 1: mod_base = OTHER; note = 2'-O-methyluridine with a 3'-phosphorothioate linkage
  modified_base 2: mod_base = OTHER; note = 2'-fluorouridine with a 3'-phosphorothioate linkage
  modified_base 3: mod_base = um
  modified_base 4: mod_base = gm
  modified_base 5: mod_base = OTHER; note = 2'-fluorouridine
  modified_base 6: mod_base = OTHER; note = 2'-O-methyladenosine
  modified_base 7: mod_base = OTHER; note = 2'-fluorouridine
  modified_base 8: mod_base = cm
  modified_base 9: mod_base = OTHER; note = 2'-O-methyladenosine
  modified_base 10: mod_base = um
  modified_base 11: mod_base = cm
  modified_base 12: mod_base = OTHER; note = 2'-O-methyladenosine
  modified_base 13: mod_base = OTHER; note = 2'-O-methyladenosine
  modified_base 14: mod_base = OTHER; note = 2'-fluoroguanosine
  modified_base 15: mod_base = cm
  modified_base 16: mod_base = OTHER; note = 2'-fluoroadenosine
  modified_base 17: mod_base = um
  modified_base 18: mod_base = um
  modified_base 19: mod_base = um
  modified_base 20: mod_base = cm
  modified_base 21: mod_base = OTHER; note = 2'-O-methyladenosine with a 3'-phosphorothioate linkage
  modified_base 22: mod_base = OTHER; note = 2'-O-methylguanosine with a 3'-phosphorothioate linkage
  modified_base 23: mod_base = gm
tttgtatcatcaagcatttcagg

SEQ ID NO: 351 - RNA, 23 nt, synthetic construct
  source 1..23: mol_type = other RNA
  modified_base 1: mod_base = OTHER; note = 2'-O-methyluridine with a 3'-phosphorothioate linkage
  modified_base 2: mod_base = OTHER; note = 2'-fluoroguanosine with a 3'-phosphorothioate linkage
  modified_base 3: mod_base = cm
  modified_base 4: mod_base = OTHER; note = 2'-O-methyladenosine
  modified_base 5: mod_base = OTHER; note = 2'-fluoroadenosine
  modified_base 6: mod_base = um
  modified_base 7: mod_base = OTHER; note = 2'-fluoroadenosine
  modified_base 8: mod_base = gm
  modified_base 9: mod_base = cm
  modified_base 10: mod_base = OTHER; note = 2'-O-methyladenosine
  modified_base 11: mod_base = gm
  modified_base 12: mod_base = gm
  modified_base 13: mod_base = um
  modified_base 14: mod_base = OTHER; note = 2'-fluorouridine
  modified_base 15: mod_base = um
  modified_base 16: mod_base = OTHER; note = 2'-fluoroadenosine
  modified_base 17: mod_base = cm
  modified_base 18: mod_base = cm
  modified_base 19: mod_base = um
  modified_base 20: mod_base = um
  modified_base 21: mod_base = OTHER; note = 2'-O-methylguanosine with a 3'-phosphorothioate linkage
  modified_base 22: mod_base = OTHER; note = 2'-O-methyluridine with a 3'-phosphorothioate linkage
  modified_base 23: mod_base = gm
tgcaatagcaggtttaccttgtg

SEQ ID NO: 352 - RNA, 23 nt, synthetic construct
  source 1..23: mol_type = other RNA
  modified_base 1: mod_base = OTHER; note = 2'-O-methyluridine with a 3'-phosphorothioate linkage
  modified_base 2: mod_base = OTHER; note = 2'-fluoroadenosine with a 3'-phosphorothioate linkage
  modified_base 3: mod_base = OTHER; note = 2'-O-methyladenosine
  modified_base 4: mod_base = um
  modified_base 5: mod_base = OTHER; note = 2'-fluoroadenosine
  modified_base 6: mod_base = gm
  modified_base 7: mod_base = OTHER; note = 2'-fluorouridine
  modified_base 8: mod_base = cm
  modified_base 9: mod_base = OTHER; note = 2'-O-methyladenosine
  modified_base 10: mod_base = um
  modified_base 11: mod_base = OTHER; note = 2'-O-methyladenosine
  modified_base 12: mod_base = um
  modified_base 13: mod_base = OTHER; note = 2'-O-methyladenosine
  modified_base 14: mod_base = OTHER; note = 2'-fluoroadenosine
  modified_base 15: mod_base = gm
  modified_base 16: mod_base = OTHER; note = 2'-fluoroguanosine
  modified_base 17: mod_base = OTHER; note = 2'-O-methyladenosine
  modified_base 18: mod_base = gm
  modified_base 19: mod_base = cm
  modified_base 20: mod_base = cm
  modified_base 21: mod_base = OTHER; note = 2'-O-methylcytidine with a 3'-phosphorothioate linkage
  modified_base 22: mod_base = OTHER; note = 2'-O-methyluridine with a 3'-phosphorothioate linkage
  modified_base 23: mod_base = gm
taatagtcatataaggagccctg

SEQ ID NO: 353 - RNA, 23 nt, synthetic construct
  source 1..23: mol_type = other RNA
  modified_base 1: mod_base = OTHER; note = 2'-O-methyluridine with a 3'-phosphorothioate linkage
  modified_base 2: mod_base = OTHER; note = 2'-fluorocytidine with a 3'-phosphorothioate linkage
  modified_base 3: mod_base = OTHER; note = 2'-O-methyladenosine
  modified_base 4: mod_base = um
  modified_base 5: mod_base = OTHER; note = 2'-fluorocytidine
  modified_base 6: mod_base = OTHER; note = 2'-O-methyladenosine
  modified_base 7: mod_base = OTHER; note = 2'-fluoroadenosine
  modified_base 8: mod_base = gm
  modified_base 9: mod_base = cm
  modified_base 10: mod_base = OTHER; note = 2'-O-methyladenosine
  modified_base 11: mod_base = um
  modified_base 12: mod_base = um
  modified_base 13: mod_base = um
  modified_base 14: mod_base = OTHER; note = 2'-fluorocytidine
  modified_base 15: mod_base = OTHER; note = 2'-O-methyladenosine
  modified_base 16: mod_base = OTHER; note = 2'-fluoroguanosine
  modified_base 17: mod_base = gm
  modified_base 18: mod_base = OTHER; note = 2'-O-methyladenosine
  modified_base 19: mod_base = gm
  modified_base 20: mod_base = cm
  modified_base 21: mod_base = OTHER; note = 2'-O-methylcytidine with a 3'-phosphorothioate linkage
  modified_base 22: mod_base = OTHER; note = 2'-O-methyladenosine with a 3'-phosphorothioate linkage
  modified_base 23: mod_base = um
tcatcaagcatttcaggagccat

SEQ ID NO: 354 - RNA, 23 nt, synthetic construct
  source 1..23: mol_type = other RNA
  modified_base 1: mod_base = OTHER; note = 2'-O-methyluridine with a 3'-phosphorothioate linkage
  modified_base 2: mod_base = OTHER; note = 2'-fluorocytidine with a 3'-phosphorothioate linkage
  modified_base 3: mod_base = um
  modified_base 4: mod_base = um
  modified_base 5: mod_base = OTHER; note = 2'-fluoroguanosine
  modified_base 6: mod_base = gm
  modified_base 7: mod_base = OTHER; note = 2'-fluorouridine
  modified_base 8: mod_base = um
  modified_base 9: mod_base = cm
  modified_base 10: mod_base = OTHER; note = 2'-O-methyladenosine
  modified_base 11: mod_base = OTHER; note = 2'-O-methyladenosine
  modified_base 12: mod_base = gm
  modified_base 13: mod_base = um
  modified_base 14: mod_base = OTHER; note = 2'-fluoroadenosine
  modified_base 15: mod_base = OTHER; note = 2'-O-methyladenosine
  modified_base 16: mod_base = OTHER; note = 2'-fluoroadenosine
  modified_base 17: mod_base = OTHER; note = 2'-O-methyladenosine
  modified_base 18: mod_base = um
  modified_base 19: mod_base = OTHER; note = 2'-O-methyladenosine
  modified_base 20: mod_base = OTHER; note = 2'-O-methyladenosine
  modified_base 21: mod_base = OTHER; note = 2'-O-methyladenosine with a 3'-phosphorothioate linkage
  modified_base 22: mod_base = OTHER; note = 2'-O-methyladenosine with a 3'-phosphorothioate linkage
  modified_base 23: mod_base = OTHER; note = 2'-O-methyladenosine
tcttggttcaagtaaaataaaaa

SEQ ID NO: 355 - RNA, 23 nt, synthetic construct
  source 1..23: mol_type = other RNA
  modified_base 1: mod_base = OTHER; note = 2'-O-methyluridine with a 3'-phosphorothioate linkage
  modified_base 2: mod_base = OTHER; note = 2'-fluorocytidine with a 3'-phosphorothioate linkage
  modified_base 3: mod_base = OTHER; note = 2'-O-methyladenosine
  modified_base 4: mod_base = cm
  modified_base 5: mod_base = OTHER; note = 2'-fluoroadenosine
  modified_base 6: mod_base = um
  modified_base 7: mod_base = OTHER; note = 2'-fluorouridine
  modified_base 8: mod_base = cm
  modified_base 9: mod_base = OTHER; note = 2'-O-methyladenosine
  modified_base 10: mod_base = um
  modified_base 11: mod_base = um
  modified_base 12: mod_base = gm
  modified_base 13: mod_base = um
  modified_base 14: mod_base = OTHER; note = 2'-fluoroadenosine
  modified_base 15: mod_base = um
  modified_base 16: mod_base = OTHER; note = 2'-fluorocytidine
  modified_base 17: mod_base = OTHER; note = 2'-O-methyladenosine
  modified_base 18: mod_base = um
  modified_base 19: mod_base = cm
  modified_base 20: mod_base = OTHER; note = 2'-O-methyladenosine
  modified_base 21: mod_base = OTHER; note = 2'-O-methyladenosine with a 3'-phosphorothioate linkage
  modified_base 22: mod_base = OTHER; note = 2'-O-methylguanosine with a 3'-phosphorothioate linkage
  modified_base 23: mod_base = cm
tcacattcattgtatcatcaagc

SEQ ID NO: 356 - RNA, 23 nt, synthetic construct
  source 1..23: mol_type = other RNA
  modified_base 1: mod_base = OTHER; note = 2'-O-methyluridine with a 3'-phosphorothioate linkage
  modified_base 2: mod_base = OTHER; note = 2'-fluorouridine with a 3'-phosphorothioate linkage
  modified_base 3: mod_base = OTHER; note = 2'-O-methyladenosine
  modified_base 4: mod_base = gm
  modified_base 5: mod_base = OTHER; note = 2'-fluorouridine
  modified_base 6: mod_base = gm
  modified_base 7: mod_base = OTHER; note = 2'-fluorouridine
  modified_base 8: mod_base = um
  modified_base 9: mod_base = cm
  modified_base 10: mod_base = OTHER; note = 2'-O-methyladenosine
  modified_base 11: mod_base = gm
  modified_base 12: mod_base = um
  modified_base 13: mod_base = OTHER; note = 2'-O-methyladenosine
  modified_base 14: mod_base = OTHER; note = 2'-fluorouridine
  modified_base 15: mod_base = um
  modified_base 16: mod_base = OTHER; note = 2'-fluoroguanosine
  modified_base 17: mod_base = OTHER; note = 2'-O-methyladenosine
  modified_base 18: mod_base = OTHER; note = 2'-O-methyladenosine
  modified_base 19: mod_base = um
  modified_base 20: mod_base = cm
  modified_base 21: mod_base = OTHER; note = 2'-O-methyladenosine with a 3'-phosphorothioate linkage
  modified_base 22: mod_base = OTHER; note = 2'-O-methyluridine with a 3'-phosphorothioate linkage
  modified_base 23: mod_base = gm
ttagtgttcagtattgaatcatg

SEQ ID NO: 357 - RNA, 23 nt, synthetic construct
  source 1..23: mol_type = other RNA
  modified_base 1: mod_base = OTHER; note = 2'-O-methyluridine with a 3'-phosphorothioate linkage
  modified_base 2: mod_base = OTHER; note = 2'-fluoroadenosine with a 3'-phosphorothioate linkage
  modified_base 3: mod_base = cm
  modified_base 4: mod_base = cm
  modified_base 5: mod_base = OTHER; note = 2'-fluoroadenosine
  modified_base 6: mod_base = gm
  modified_base 7: mod_base = OTHER; note = 2'-fluoroadenosine
  modified_base 8: mod_base = cm
  modified_base 9: mod_base = cm
  modified_base 10: mod_base = OTHER; note = 2'-O-methyladenosine
  modified_base 11: mod_base = OTHER; note = 2'-O-methyladenosine
  modified_base 12: mod_base = cm
  modified_base 13: mod_base = OTHER; note = 2'-O-methyladenosine
  modified_base 14: mod_base = OTHER; note = 2'-fluoroguanosine
  modified_base 15: mod_base = OTHER; note = 2'-O-methyladenosine
  modified_base 16: mod_base = OTHER; note = 2'-fluoroadenosine
  modified_base 17: mod_base = um
  modified_base 18: mod_base = OTHER; note = 2'-O-methyladenosine
  modified_base 19: mod_base = gm
  modified_base 20: mod_base = OTHER; note = 2'-O-methyladenosine
  modified_base 21: mod_base = OTHER; note = 2'-O-methyluridine with a 3'-phosphorothioate linkage
  modified_base 22: mod_base = OTHER; note = 2'-O-methylguanosine with a 3'-phosphorothioate linkage
  modified_base 23: mod_base = um
taccagaccaacagaatagatgt

SEQ ID NO: 358 - RNA, 23 nt, synthetic construct
  source 1..23: mol_type = other RNA
  modified_base 1: mod_base = OTHER; note = 2'-O-methyluridine with a 3'-phosphorothioate linkage
  modified_base 2: mod_base = OTHER; note = 2'-fluoroguanosine with a 3'-phosphorothioate linkage
  modified_base 3: mod_base = OTHER; note = 2'-O-methyladenosine
  modified_base 4: mod_base = gm
  modified_base 5: mod_base = OTHER; note = 2'-fluoroadenosine
  modified_base 6: mod_base = um
  modified_base 7: mod_base = OTHER; note = 2'-fluorouridine
  modified_base 8: mod_base = gm
  modified_base 9: mod_base = gm
  modified_base 10: mod_base = OTHER; note = 2'-O-methyladenosine
  modified_base 11: mod_base = um
  modified_base 12: mod_base = gm
  modified_base 13: mod_base = OTHER; note = 2'-O-methyladenosine
  modified_base 14: mod_base = OTHER; note = 2'-fluoroadenosine
  modified_base 15: mod_base = gm
  modified_base 16: mod_base = OTHER; note = 2'-fluorouridine
  modified_base 17: mod_base = cm
  modified_base 18: mod_base = OTHER; note = 2'-O-methyladenosine
  modified_base 19: mod_base = OTHER; note = 2'-O-methyladenosine
  modified_base 20: mod_base = cm
  modified_base 21: mod_base = OTHER; note = 2'-O-methyluridine with a 3'-phosphorothioate linkage
  modified_base 22: mod_base = OTHER; note = 2'-O-methylcytidine with a 3'-phosphorothioate linkage
  modified_base 23: mod_base = cm
tgagattggatgaagtcaactcc

SEQ ID NO: 359 - RNA, 23 nt, synthetic construct
  source 1..23: mol_type = other RNA
  modified_base 1: mod_base = OTHER; note = 2'-O-methyluridine with a 3'-phosphorothioate linkage
  modified_base 2: mod_base = OTHER; note = 2'-fluorouridine with a 3'-phosphorothioate linkage
  modified_base 3: mod_base = gm
  modified_base 4: mod_base = OTHER; note = 2'-O-methyladenosine
  modified_base 5: mod_base = OTHER; note = 2'-fluorouridine
  modified_base 6: mod_base = um
  modified_base 7: mod_base = OTHER; note = 2'-fluorouridine
  modified_base 8: mod_base = um
  modified_base 9: mod_base = OTHER; note = 2'-O-methyladenosine
  modified_base 10: mod_base = um
  modified_base 11: mod_base = gm
  modified_base 12: mod_base = um
  modified_base 13: mod_base = cm
  modified_base 14: mod_base = OTHER; note = 2'-fluorouridine
  modified_base 15: mod_base = cm
  modified_base 16: mod_base = OTHER; note = 2'-fluoroguanosine
  modified_base 17: mod_base = OTHER; note = 2'-O-methyladenosine
  modified_base 18: mod_base = um
  modified_base 19: mod_base = gm
  modified_base 20: mod_base = OTHER; note = 2'-O-methyladenosine
  modified_base 21: mod_base = OTHER; note = 2'-O-methylguanosine with a 3'-phosphorothioate linkage
  modified_base 22: mod_base = OTHER; note = 2'-O-methylcytidine with a 3'-phosphorothioate linkage
  modified_base 23: mod_base = OTHER; note = 2'-O-methyladenosine
ttgattttatgtctcgatgagca

SEQ ID NO: 360 - RNA, 23 nt, synthetic construct
  source 1..23: mol_type = other RNA
  modified_base 1: mod_base = OTHER; note = 2'-O-methyluridine with a 3'-phosphorothioate linkage
  modified_base 2: mod_base = OTHER; note = 2'-fluoroadenosine with a 3'-phosphorothioate linkage
  modified_base 3: mod_base = cm
  modified_base 4: mod_base = um
  modified_base 5: mod_base = OTHER; note = 2'-fluoroguanosine
  modified_base 6: mod_base = um
  modified_base 7: mod_base = OTHER; note = 2'-fluorocytidine
  modified_base 8: mod_base = um
  modified_base 9: mod_base = um
  modified_base 10: mod_base = OTHER; note = 2'-O-methyladenosine
  modified_base 11: mod_base = um
  modified_base 12: mod_base = cm
  modified_base 13: mod_base = um
  modified_base 14: mod_base = OTHER; note = 2'-fluorouridine
  modified_base 15: mod_base = um
  modified_base 16: mod_base = OTHER; note = 2'-fluoroguanosine
  modified_base 17: mod_base = OTHER; note = 2'-O-methyladenosine
  modified_base 18: mod_base = gm
  modified_base 19: mod_base = gm
  modified_base 20: mod_base = um
  modified_base 21: mod_base = OTHER; note = 2'-O-methyladenosine with a 3'-phosphorothioate linkage
  modified_base 22: mod_base = OTHER; note = 2'-O-methylguanosine with a 3'-phosphorothioate linkage
  modified_base 23: mod_base = OTHER; note = 2'-O-methyladenosine
tactgtcttatctttgaggtaga

SEQ ID NO: 361 - RNA, 23 nt, synthetic construct
  source 1..23: mol_type = other RNA
  modified_base 1: mod_base = OTHER; note = 2'-O-methyluridine with a 3'-phosphorothioate linkage
  modified_base 2: mod_base = OTHER; note = 2'-fluoroadenosine with a 3'-phosphorothioate linkage
  modified_base 3: mod_base = um
  modified_base 4: mod_base = OTHER; note = 2'-O-methyladenosine
  modified_base 5: mod_base = OTHER; note = 2'-fluoroadenosine
  modified_base 6: mod_base = OTHER; note = 2'-O-methyladenosine
  modified_base 7: mod_base = OTHER; note = 2'-fluoroadenosine
  modified_base 8: mod_base = OTHER; note = 2'-O-methyladenosine
  modified_base 9: mod_base = cm
  modified_base 10: mod_base = um
  modified_base 11: mod_base = um
  modified_base 12: mod_base = OTHER; note = 2'-O-methyladenosine
  modified_base 13: mod_base = OTHER; note = 2'-O-methyladenosine
  modified_base 14: mod_base = OTHER; note = 2'-fluorouridine
  modified_base 15: mod_base = gm
  modified_base 16: mod_base = OTHER; note = 2'-fluoroadenosine
  modified_base 17: mod_base = cm
  modified_base 18: mod_base = um
  modified_base 19: mod_base = OTHER; note = 2'-O-methyladenosine
  modified_base 20: mod_base = um
  modified_base 21: mod_base = OTHER; note = 2'-O-methyladenosine with a 3'-phosphorothioate linkage
  modified_base 22: mod_base = OTHER; note = 2'-O-methyladenosine with a 3'-phosphorothioate linkage
  modified_base 23: mod_base = cm
tataaaaacttaatgactataac

SEQ ID NO: 362 - RNA, 23 nt, synthetic construct
  source 1..23: mol_type = other RNA
  modified_base 1: mod_base = OTHER; note = 2'-O-methyluridine with a 3'-phosphorothioate linkage
  modified_base 2: mod_base = OTHER; note = 2'-fluoroadenosine with a 3'-phosphorothioate linkage
  modified_base 3: mod_base = cm
  modified_base 4: mod_base = um
  modified_base 5: mod_base = OTHER; note = 2'-fluoroguanosine
  modified_base 6: mod_base = um
  modified_base 7: mod_base = OTHER; note = 2'-fluoroadenosine
  modified_base 8: mod_base = cm
  modified_base 9: mod_base = um
  modified_base 10: mod_base = gm
  modified_base 11: mod_base = um
  modified_base 12: mod_base = cm
  modified_base 13: mod_base = um
  modified_base 14: mod_base = OTHER; note = 2'-fluorouridine
  modified_base 15: mod_base = OTHER; note = 2'-O-methyladenosine
  modified_base 16: mod_base = OTHER; note = 2'-fluorouridine
  modified_base 17: mod_base = cm
  modified_base 18: mod_base = um
  modified_base 19: mod_base = um
  modified_base 20: mod_base = um
  modified_base 21: mod_base = OTHER; note = 2'-O-methylguanosine with a 3'-phosphorothioate linkage
  modified_base 22: mod_base = OTHER; note = 2'-O-methyladenosine with a 3'-phosphorothioate linkage
  modified_base 23: mod_base = gm
tactgtactgtcttatctttgag

SEQ ID NO: 363 - RNA, 23 nt, synthetic construct
  source 1..23: mol_type = other RNA
  modified_base 1: mod_base = OTHER; note = 2'-O-methyluridine with a 3'-phosphorothioate linkage
  modified_base 2: mod_base = OTHER; note = 2'-fluorouridine with a 3'-phosphorothioate linkage
  modified_base 3: mod_base = um
  modified_base 4: mod_base = um
  modified_base 5: mod_base = OTHER; note = 2'-fluorouridine
  modified_base 6: mod_base = cm
  modified_base 7: mod_base = OTHER; note = 2'-fluoroadenosine
  modified_base 8: mod_base = cm
  modified_base 9: mod_base = um
  modified_base 10: mod_base = OTHER; note = 2'-O-methyladenosine
  modified_base 11: mod_base = OTHER; note = 2'-O-methyladenosine
  modified_base 12: mod_base = gm
  modified_base 13: mod_base = OTHER; note = 2'-O-methyladenosine
  modified_base 14: mod_base = OTHER; note = 2'-fluorouridine
  modified_base 15: mod_base = OTHER; note = 2'-O-methyladenosine
  modified_base 16: mod_base = OTHER; note = 2'-fluorouridine
  modified_base 17: mod_base = um
  modified_base 18: mod_base = cm
  modified_base 19: mod_base = um
  modified_base 20: mod_base = um
  modified_base 21: mod_base = OTHER; note = 2'-O-methyluridine with a 3'-phosphorothioate linkage
  modified_base 22: mod_base = OTHER; note = 2'-O-methylguanosine with a 3'-phosphorothioate linkage
  modified_base 23: mod_base = OTHER; note = 2'-O-methyladenosine
tttttcactaagatattctttga

SEQ ID NO: 364 - RNA, 23 nt, synthetic construct
  source 1..23: mol_type = other RNA
  modified_base 1: mod_base = OTHER; note = 2'-O-methyluridine with a 3'-phosphorothioate linkage
  modified_base 2: mod_base = OTHER; note = 2'-fluoroguanosine with a 3'-phosphorothioate linkage
  modified_base 3: mod_base = um
  modified_base 4: mod_base = cm
  modified_base 5: mod_base = OTHER; note = 2'-fluoroadenosine
  modified_base 6: mod_base = um
  modified_base 7: mod_base = OTHER; note = 2'-fluoroadenosine
  modified_base 8: mod_base = OTHER; note = 2'-O-methyladenosine
  modified_base 9: mod_base = um
  modified_base 10: mod_base = OTHER; note = 2'-O-methyladenosine
  modified_base 11: mod_base = OTHER; note = 2'-O-methyladenosine
  modified_base 12: mod_base = gm
  modified_base 13: mod_base = gm
  modified_base 14: mod_base = OTHER; note = 2'-fluorocytidine
  modified_base 15: mod_base = OTHER; note = 2'-O-methyladenosine
  modified_base 16: mod_base = OTHER; note = 2'-fluoroadenosine
  modified_base 17: mod_base = um
  modified_base 18: mod_base = um
  modified_base 19: mod_base = gm
  modified_base 20: mod_base = gm
  modified_base 21: mod_base = OTHER; note = 2'-O-methyluridine with a 3'-phosphorothioate linkage
  modified_base 22: mod_base = OTHER; note = 2'-O-methyladenosine with a 3'-phosphorothioate linkage
  modified_base 23: mod_base = cm
tgtcataataaggcaattggtac

SEQ ID NO: 365 - RNA, 23 nt, synthetic construct
  source 1..23: mol_type = other RNA
  modified_base 1: mod_base = OTHER; note = 2'-O-methyluridine with a 3'-phosphorothioate linkage
  modified_base 2: mod_base = OTHER; note = 2'-fluorouridine with a 3'-phosphorothioate linkage
  modified_base 3: mod_base = cm
  modified_base 4: mod_base = um
  modified_base 5: mod_base = OTHER; note = 2'-fluorouridine
  modified_base 6: mod_base = um
  modified_base 7: mod_base = OTHER; note = 2'-fluoroguanosine
  modified_base 8: mod_base = OTHER; note = 2'-O-methyladenosine
  modified_base 9: mod_base = gm
  modified_base 10: mod_base = gm
  modified_base 11: mod_base = um
  modified_base 12: mod_base = OTHER; note = 2'-O-methyladenosine
  modified_base 13: mod_base = gm
  modified_base 14: mod_base = OTHER; note = 2'-fluoroadenosine
  modified_base 15: mod_base = OTHER; note = 2'-O-methyladenosine
  modified_base 16: mod_base = OTHER; note = 2'-fluorocytidine
  modified_base 17: mod_base = OTHER; note = 2'-O-methyladenosine
  modified_base 18: mod_base = OTHER; note = 2'-O-methyladenosine
  modified_base 19: mod_base = OTHER; note = 2'-O-methyladenosine
  modified_base 20: mod_base = OTHER; note = 2'-O-methyladenosine
  modified_base 21: mod_base = OTHER; note = 2'-O-methyladenosine with a 3'-phosphorothioate linkage
  modified_base 22: mod_base = OTHER; note = 2'-O-methyladenosine with a 3'-phosphorothioate linkage
  modified_base 23: mod_base = OTHER; note = 2'-O-methyladenosine
ttctttgaggtagaacaaaaaaa

SEQ ID NO: 366 - RNA, 23 nt, synthetic construct
  source 1..23: mol_type = other RNA
  modified_base 1: mod_base = OTHER; note = 2'-O-methyluridine with a 3'-phosphorothioate linkage
  modified_base 2: mod_base = OTHER; note = 2'-fluoroadenosine with a 3'-phosphorothioate linkage
  modified_base 3: mod_base = cm
  modified_base 4: mod_base = OTHER; note = 2'-O-methyladenosine
  modified_base 5: mod_base = OTHER; note = 2'-fluorouridine
  modified_base 6: mod_base = OTHER; note = 2'-O-methyladenosine
  modified_base 7: mod_base = OTHER; note = 2'-fluoroadenosine
  modified_base 8: mod_base = OTHER; note = 2'-O-methyladenosine
  modified_base 9: mod_base = gm
  modified_base 10: mod_base = gm
  modified_base 11: mod_base = gm
  modified_base 12: mod_base = gm
  modified_base 13: mod_base = OTHER; note = 2'-O-methyladenosine
  modified_base 14: mod_base = OTHER; note = 2'-fluoroadenosine
  modified_base 15: mod_base = OTHER; note = 2'-O-methyladenosine
  modified_base 16: mod_base = OTHER; note = 2'-fluoroadenosine
  modified_base 17: mod_base = um
  modified_base 18: mod_base = gm
  modified_base 19: mod_base = gm
  modified_base 20: mod_base = OTHER; note = 2'-O-methyladenosine
  modified_base 21: mod_base = OTHER; note = 2'-O-methyladenosine with a 3'-phosphorothioate linkage
  modified_base 22: mod_base = OTHER; note = 2'-O-methyladenosine with a 3'-phosphorothioate linkage
  modified_base 23: mod_base = OTHER; note = 2'-O-methyladenosine
tacataaaggggaaaatggaaaa

SEQ ID NO: 367 - RNA, 23 nt, synthetic construct
  source 1..23: mol_type = other RNA
  modified_base 1: mod_base = OTHER; note = 2'-O-methyluridine with a 3'-phosphorothioate linkage
  modified_base 2: mod_base = OTHER; note = 2'-fluorocytidine with a 3'-phosphorothioate linkage
  modified_base 3: mod_base = um
  modified_base 4: mod_base = gm
  modified_base 5: mod_base = OTHER; note = 2'-fluorouridine
  modified_base 6: mod_base = cm
  modified_base 7: mod_base = OTHER; note = 2'-fluorouridine
  modified_base 8: mod_base = um
  modified_base 9: mod_base = OTHER; note = 2'-O-methyladenosine
  modified_base 10: mod_base = um
  modified_base 11: mod_base = cm
  modified_base 12: mod_base = um
  modified_base 13: mod_base = um
  modified_base 14: mod_base = OTHER; note = 2'-fluorouridine
  modified_base 15: mod_base = gm
  modified_base 16: mod_base = OTHER; note = 2'-fluoroadenosine
  modified_base 17: mod_base = gm
  modified_base 18: mod_base = gm
  modified_base 19: mod_base = um
  modified_base 20: mod_base = OTHER; note = 2'-O-methyladenosine
  modified_base 21: mod_base = OTHER; note = 2'-O-methylguanosine with a 3'-phosphorothioate linkage
  modified_base 22: mod_base = OTHER; note = 2'-O-methyladenosine with a 3'-phosphorothioate linkage
  modified_base 23: mod_base = OTHER; note = 2'-O-methyladenosine
tctgtcttatctttgaggtagaa

SEQ ID NO: 368 - RNA, 23 nt, synthetic construct
  source 1..23: mol_type = other RNA
  modified_base 1: mod_base = OTHER; note = 2'-O-methyluridine with a 3'-phosphorothioate linkage
  modified_base 2: mod_base = OTHER; note = 2'-fluorocytidine with a 3'-phosphorothioate linkage
  modified_base 3: mod_base = OTHER; note = 2'-O-methyladenosine
  modified_base 4: mod_base = cm
  modified_base 5: mod_base = OTHER; note = 2'-fluorouridine
  modified_base 6: mod_base = OTHER; note = 2'-O-methyladenosine
  modified_base 7: mod_base = OTHER; note = 2'-fluoroadenosine
  modified_base 8: mod_base = gm
  modified_base 9: mod_base = OTHER; note = 2'-O-methyladenosine
  modified_base 10: mod_base = um
  modified_base 11: mod_base = OTHER; note = 2'-O-methyladenosine
  modified_base 12: mod_base = um
  modified_base 13: mod_base = um
  modified_base 14: mod_base = OTHER; note = 2'-fluorocytidine
  modified_base 15: mod_base = um
  modified_base 16: mod_base = OTHER; note = 2'-fluorouridine
  modified_base 17: mod_base = um
  modified_base 18: mod_base = gm
  modified_base 19: mod_base = OTHER; note = 2'-O-methyladenosine
  modified_base 20: mod_base = um
  modified_base 21: mod_base = OTHER; note = 2'-O-methyluridine with a 3'-phosphorothioate linkage
  modified_base 22: mod_base = OTHER; note = 2'-O-methyluridine with a 3'-phosphorothioate linkage
  modified_base 23: mod_base = um
tcactaagatattctttgatttt

SEQ ID NO: 369 - RNA, 23 nt, synthetic construct
  source 1..23: mol_type = other RNA
  modified_base 1: mod_base = OTHER; note = 2'-O-methyluridine with a 3'-phosphorothioate linkage
  modified_base 2: mod_base = OTHER; note = 2'-fluorouridine with a 3'-phosphorothioate linkage
  modified_base 3: mod_base = um
  modified_base 4: mod_base = cm
  modified_base 5: mod_base = OTHER; note = 2'-fluoroadenosine
  modified_base 6: mod_base = um
  modified_base 7: mod_base = OTHER; note = 2'-fluorouridine
  modified_base 8: mod_base = gm
  modified_base 9: mod_base = um
  modified_base 10: mod_base = OTHER; note = 2'-O-methyladenosine
  modified_base 11: mod_base = um
  modified_base 12: mod_base = cm
  modified_base 13: mod_base = OTHER; note = 2'-O-methyladenosine
  modified_base 14: mod_base = OTHER; note = 2'-fluorouridine
  modified_base 15: mod_base = cm
  modified_base 16: mod_base = OTHER; note = 2'-fluoroadenosine
  modified_base 17: mod_base = OTHER; note = 2'-O-methyladenosine
  modified_base 18: mod_base = gm
  modified_base 19: mod_base = cm
  modified_base 20: mod_base = OTHER; note = 2'-O-methyladenosine
  modified_base 21: mod_base = OTHER; note = 2'-O-methyluridine with a 3'-phosphorothioate linkage
  modified_base 22: mod_base = OTHER; note = 2'-O-methyluridine with a 3'-phosphorothioate linkage
  modified_base 23: mod_base = um
tttcattgtatcatcaagcattt

SEQ ID NO: 370 - RNA, 23 nt, synthetic construct
  source 1..23: mol_type = other RNA
  modified_base 1: mod_base = OTHER; note = 2'-O-methyluridine with a 3'-phosphorothioate linkage
  modified_base 2: mod_base = OTHER; note = 2'-fluoroadenosine with a 3'-phosphorothioate linkage
  modified_base 3: mod_base = OTHER; note = 2'-O-methyladenosine
  modified_base 4: mod_base = cm
  modified_base 5: mod_base = OTHER; note = 2'-fluoroadenosine
  modified_base 6: mod_base = um
  modified_base 7: mod_base = OTHER; note = 2'-fluoroadenosine
  modified_base 8: mod_base = gm
  modified_base 9: mod_base = OTHER; note = 2'-O-methyladenosine
  modified_base 10: mod_base = um
  modified_base 11: mod_base = um
  modified_base 12: mod_base = gm
  modified_base 13: mod_base = cm
  modified_base 14: mod_base = OTHER; note = 2'-fluoroadenosine
  modified_base 15: mod_base = um
  modified_base 16: mod_base = OTHER; note = 2'-fluorocytidine
  modified_base 17: mod_base = OTHER; note = 2'-O-methyladenosine
  modified_base 18: mod_base = cm
  modified_base 19: mod_base = cm
  modified_base 20: mod_base = um
  modified_base 21: mod_base = OTHER; note = 2'-O-methyladenosine with a 3'-phosphorothioate linkage
  modified_base 22: mod_base = OTHER; note = 2'-O-methyladenosine with a 3'-phosphorothioate linkage
  modified_base 23: mod_base = OTHER; note = 2'-O-methyladenosine
taacatagattgcatcacctaaa

SEQ ID NO: 371 - RNA, 23 nt, synthetic construct
  source 1..23: mol_type = other RNA
  modified_base 1: mod_base = OTHER; note = 2'-O-methyluridine with a 3'-phosphorothioate linkage
  modified_base 2: mod_base = OTHER; note = 2'-fluorouridine with a 3'-phosphorothioate linkage
  modified_base 3: mod_base = um
  modified_base 4: mod_base = gm
  modified_base 5: mod_base = OTHER; note = 2'-fluoroadenosine
  modified_base 6: mod_base = cm
  modified_base 7: mod_base = OTHER; note = 2'-fluoroadenosine
  modified_base 8: mod_base = cm
  modified_base 9: mod_base = OTHER; note = 2'-O-methyladenosine
  modified_base 10: mod_base = OTHER; note = 2'-O-methyladenosine
  modified_base 11: mod_base = OTHER; note = 2'-O-methyladenosine
  modified_base 12: mod_base = gm
  modified_base 13: mod_base = um
  modified_base 14: mod_base = OTHER; note = 2'-fluorouridine
  modified_base 15: mod_base = gm
  modified_base 16: mod_base = OTHER; note = 2'-fluoroadenosine
  modified_base 17: mod_base = gm
  modified_base 18: mod_base = OTHER; note = 2'-O-methyladenosine
  modified_base 19: mod_base = um
  modified_base 20: mod_base = OTHER; note = 2'-O-methyladenosine
  modified_base 21: mod_base = OTHER; note = 2'-O-methyluridine with a 3'-phosphorothioate linkage
  modified_base 22: mod_base = OTHER; note = 2'-O-methyladenosine with a 3'-phosphorothioate linkage
  modified_base 23: mod_base = gm
tttgacacaaagttgagatatag

SEQ ID NO: 372 - RNA, 23 nt, synthetic construct
  source 1..23: mol_type = other RNA
  modified_base 1: mod_base = OTHER; note = 2'-O-methyluridine with a 3'-phosphorothioate linkage
  modified_base 2: mod_base = OTHER; note = 2'-fluorouridine with a 3'-phosphorothioate linkage
  modified_base 3: mod_base = cm
  modified_base 4: mod_base = OTHER; note = 2'-O-methyladenosine
  modified_base 5: mod_base = OTHER; note = 2'-fluoroadenosine
  modified_base 6: mod_base = OTHER; note = 2'-O-methyladenosine
  modified_base 7: mod_base = OTHER; note = 2'-fluoroguanosine
  modified_base 8: mod_base = OTHER; note = 2'-O-methyladenosine
  modified_base 9: mod_base = um
  modified_base 10: mod_base = OTHER; note = 2'-O-methyladenosine
  modified_base 11: mod_base = um
  modified_base 12: mod_base = um
  modified_base 13: mod_base = cm
  modified_base 14: mod_base = OTHER; note = 2'-fluoroadenosine
  modified_base 15: mod_base = cm
  modified_base 16: mod_base = OTHER; note = 2'-fluoroadenosine
  modified_base 17: mod_base = um
  modified_base 18: mod_base = um
  modified_base 19: mod_base = cm
  modified_base 20: mod_base = OTHER; note = 2'-O-methyladenosine
  modified_base 21: mod_base = OTHER; note = 2'-O-methyluridine with a 3'-phosphorothioate linkage
  modified_base 22: mod_base = OTHER; note = 2'-O-methyluridine with a 3'-phosphorothioate linkage
  modified_base 23: mod_base = gm
ttcaaagatattcacattcattg

SEQ ID NO: 373 - RNA, 23 nt, synthetic construct
  source 1..23: mol_type = other RNA
  modified_base 1: mod_base = OTHER; note = 2'-O-methyluridine with a 3'-phosphorothioate linkage
  modified_base 2: mod_base = OTHER; note = 2'-fluorouridine with a 3'-phosphorothioate linkage
  modified_base 3: mod_base = OTHER; note = 2'-O-methyladenosine
  modified_base 4: mod_base = gm
  modified_base 5: mod_base = OTHER; note = 2'-fluoroadenosine
  modified_base 6: mod_base = um
  modified_base 7: mod_base = OTHER; note = 2'-fluoroguanosine
  modified_base 8: mod_base = um
  modified_base 9: mod_base = cm
  modified_base 10: mod_base = OTHER; note = 2'-O-methyladenosine
  modified_base 11: mod_base = gm
  modified_base 12: mod_base = cm
  modified_base 13: mod_base = um
  modified_base 14: mod_base = OTHER; note = 2'-fluorocytidine
  modified_base 15: mod_base = gm
  modified_base 16: mod_base = OTHER; note = 2'-fluorouridine
  modified_base 17: mod_base = um
  modified_base 18: mod_base = um
  modified_base 19: mod_base = gm
  modified_base 20: mod_base = OTHER; note = 2'-O-methyladenosine
  modified_base 21: mod_base = OTHER; note = 2'-O-methyladenosine with a 3'-phosphorothioate linkage
  modified_base 22: mod_base = OTHER; note = 2'-O-methylguanosine with a 3'-phosphorothioate linkage
  modified_base 23: mod_base = gm
ttagatgtcagctcgtttgaagg

SEQ ID NO: 374 - RNA, 23 nt, synthetic construct
  source 1..23: mol_type = other RNA
  modified_base 1: mod_base = OTHER; note = 2'-O-methyluridine with a 3'-phosphorothioate linkage
  modified_base 2: mod_base = OTHER; note = 2'-fluorouridine with a 3'-phosphorothioate linkage
  modified_base 3: mod_base = um
  modified_base 4: mod_base = OTHER; note = 2'-O-methyladenosine
  modified_base 5: mod_base = OTHER; note = 2'-fluoroguanosine
  modified_base 6: mod_base = OTHER; note = 2'-O-methyladenosine
  modified_base 7: mod_base = OTHER; note = 2'-fluoroguanosine
  modified_base 8: mod_base = cm
  modified_base 9: mod_base = OTHER; note = 2'-O-methyladenosine
  modified_base 10: mod_base = OTHER; note = 2'-O-methyladenosine
  modified_base 11: mod_base = um
  modified_base 12: mod_base = OTHER; note = 2'-O-methyladenosine
  modified_base 13: mod_base = um
  modified_base 14: mod_base = OTHER; note = 2'-fluorouridine
  modified_base 15: mod_base = um
  modified_base 16: mod_base = OTHER; note = 2'-fluoroadenosine
  modified_base 17: mod_base = um
  modified_base 18: mod_base = um
  modified_base 19: mod_base = um
  modified_base 20: mod_base = um
  modified_base 21: mod_base = OTHER; note = 2'-O-methyluridine with a 3'-phosphorothioate linkage
  modified_base 22: mod_base = OTHER; note = 2'-O-methyladenosine with a 3'-phosphorothioate linkage
  modified_base 23: mod_base = OTHER; note = 2'-O-methyladenosine
tttagagcaatatttatttttaa

SEQ ID NO: 375 - RNA, 23 nt, synthetic construct
  source 1..23: mol_type = other RNA
  modified_base 1: mod_base = OTHER; note = 2'-O-methyluridine with a 3'-phosphorothioate linkage
  modified_base 2: mod_base = OTHER; note = 2'-fluoroguanosine with a 3'-phosphorothioate linkage
  modified_base 3: mod_base = gm
  modified_base 4: mod_base = OTHER; note = 2'-O-methyladenosine
  modified_base 5: mod_base = OTHER; note = 2'-fluoroadenosine
  modified_base 6: mod_base = OTHER; note = 2'-O-methyladenosine
  modified_base 7: mod_base = OTHER; note = 2'-fluoroadenosine
  modified_base 8: mod_base = gm
  modified_base 9: mod_base = OTHER; note = 2'-O-methyladenosine
  modified_base 10: mod_base = OTHER; note = 2'-O-methyladenosine
  modified_base 11: mod_base = OTHER; note = 2'-O-methyladenosine
  modified_base 12: mod_base = gm
  modified_base 13: mod_base = cm
  modified_base 14: mod_base = OTHER; note = 2'-fluorouridine
  modified_base 15: mod_base = OTHER; note = 2'-O-methyladenosine
  modified_base 16: mod_base = OTHER; note = 2'-fluorouridine
  modified_base 17: mod_base = gm
  modified_base 18: mod_base = OTHER; note = 2'-O-methyladenosine
  modified_base 19: mod_base = gm
  modified_base 20: mod_base = OTHER; note = 2'-O-methyladenosine
  modified_base 21: mod_base = OTHER; note = 2'-O-methylguanosine with a 3'-phosphorothioate linkage
  modified_base 22: mod_base = OTHER; note = 2'-O-methyladenosine with a 3'-phosphorothioate linkage
  modified_base 23: mod_base = um
tggaaaagaaagctatgagagat

SEQ ID NO: 376 - RNA, 23 nt, synthetic construct
  source 1..23: mol_type = other RNA
  modified_base 1: mod_base = OTHER; note = 2'-O-methyluridine with a 3'-phosphorothioate linkage
  modified_base 2: mod_base = OTHER; note = 2'-fluoroadenosine with a 3'-phosphorothioate linkage
  modified_base 3: mod_base = cm
  modified_base 4: mod_base = cm
  modified_base 5: mod_base = OTHER; note = 2'-fluorouridine
  modified_base 6: mod_base = um
  modified_base 7: mod_base = OTHER; note = 2'-fluorouridine
  modified_base 8: mod_base = cm
  modified_base 9: mod_base = um
  modified_base 10: mod_base = cm
  modified_base 11: mod_base = OTHER; note = 2'-O-methyladenosine
  modified_base 12: mod_base = um
  modified_base 13: mod_base = um
  modified_base 14: mod_base = OTHER; note = 2'-fluorouridine
  modified_base 15: mod_base = cm
  modified_base 16: mod_base = OTHER; note = 2'-fluorocytidine
  modified_base 17: mod_base = um
  modified_base 18: mod_base = cm
  modified_base 19: mod_base = um
  modified_base 20: mod_base = OTHER; note = 2'-O-methyladenosine
  modified_base 21: mod_base = OTHER; note = 2'-O-methyluridine with a 3'-phosphorothioate linkage
  modified_base 22: mod_base = OTHER; note = 2'-O-methylcytidine with a 3'-phosphorothioate linkage
  modified_base 23: mod_base = gm
tacctttctcatttcctctatcg

SEQ ID NO: 377 - RNA, 23 nt, synthetic construct
  source 1..23: mol_type = other RNA
  modified_base 1: mod_base = OTHER; note = 2'-O-methyluridine with a 3'-phosphorothioate linkage
  modified_base 2: mod_base = OTHER; note = 2'-fluorocytidine with a 3'-phosphorothioate linkage
  modified_base 3: mod_base = OTHER; note = 2'-O-methyladenosine
  modified_base 4: mod_base = OTHER; note = 2'-O-methyladenosine
  modified_base 5: mod_base = OTHER; note = 2'-fluoroguanosine
  modified_base 6: mod_base = um
  modified_base 7: mod_base = OTHER; note = 2'-fluorouridine
  modified_base 8: mod_base = um
  modified_base 9: mod_base = cm
  modified_base 10: mod_base = OTHER; note = 2'-O-methyladenosine
  modified_base 11: mod_base = cm
  modified_base 12: mod_base = OTHER; note = 2'-O-methyladenosine
  modified_base 13: mod_base = cm
  modified_base 14: mod_base = OTHER; note = 2'-fluorouridine
  modified_base 15: mod_base = um
  modified_base 16: mod_base = OTHER; note = 2'-fluorouridine
  modified_base 17: mod_base = um
  modified_base 18: mod_base = um
  modified_base 19: mod_base = cm
  modified_base 20: mod_base = OTHER; note = 2'-O-methyladenosine
  modified_base 21: mod_base = OTHER; note = 2'-O-methylcytidine with a 3'-phosphorothioate linkage
  modified_base 22: mod_base = OTHER; note = 2'-O-methyluridine with a 3'-phosphorothioate linkage
  modified_base 23: mod_base = OTHER; note = 2'-O-methyladenosine
tcaagtttcacactttttcacta

SEQ ID NO: 378 - RNA, 23 nt, synthetic construct
  source 1..23: mol_type = other RNA
  modified_base 1: mod_base = OTHER; note = 2'-O-methyluridine with a 3'-phosphorothioate linkage
  modified_base 2: mod_base = OTHER; note = 2'-fluoroadenosine with a 3'-phosphorothioate linkage
  modified_base 3: mod_base = cm
  modified_base 4: mod_base = cm
  modified_base 5: mod_base = OTHER; note = 2'-fluoroadenosine
  modified_base 6: mod_base = gm
  modified_base 7: mod_base = OTHER; note = 2'-fluorocytidine
  modified_base 8: mod_base = cm
  modified_base 9: mod_base = OTHER; note = 2'-O-methyladenosine
  modified_base 10: mod_base = OTHER; note = 2'-O-methyladenosine
  modified_base 11: mod_base = OTHER; note = 2'-O-methyladenosine
  modified_base 12: mod_base = gm
  modified_base 13: mod_base = um
  modified_base 14: mod_base = OTHER; note = 2'-fluorouridine
  modified_base 15: mod_base = gm
  modified_base 16: mod_base = OTHER; note = 2'-fluoroadenosine
  modified_base 17: mod_base = gm
  modified_base 18: mod_base = um
  modified_base 19: mod_base = cm
  modified_base 20: mod_base = cm
  modified_base 21: mod_base = OTHER; note = 2'-O-methyladenosine with a 3'-phosphorothioate linkage
  modified_base 22: mod_base = OTHER; note = 2'-O-methyladenosine with a 3'-phosphorothioate linkage
  modified_base 23: mod_base = gm
taccagccaaagttgagtccaag

SEQ ID NO: 379 - RNA, 23 nt, synthetic construct
  source 1..23: mol_type = other RNA
  modified_base 1: mod_base = OTHER; note = 2'-O-methyluridine with a 3'-phosphorothioate linkage
  modified_base 2: mod_base = OTHER; note = 2'-fluorocytidine with a 3'-phosphorothioate linkage
  modified_base 3: mod_base = OTHER; note = 2'-O-methyladenosine
  modified_base 4: mod_base = OTHER; note = 2'-O-methyladenosine
  modified_base 5: mod_base = OTHER; note = 2'-fluoroguanosine
  modified_base 6: mod_base = um
  modified_base 7: mod_base = OTHER; note = 2'-fluoroadenosine
  modified_base 8: mod_base = OTHER; note = 2'-O-methyladenosine
  modified_base 9: mod_base = OTHER; note = 2'-O-methyladenosine
  modified_base 10: mod_base = OTHER; note = 2'-O-methyladenosine
  modified_base 11: mod_base = um
  modified_base 12: mod_base = OTHER; note = 2'-O-methyladenosine
  modified_base 13: mod_base = OTHER; note = 2'-O-methyladenosine
  modified_base 14: mod_base = OTHER; note = 2'-fluoroadenosine
  modified_base 15: mod_base = OTHER; note = 2'-O-methyladenosine
  modified_base 16: mod_base = OTHER; note = 2'-fluoroadenosine
  modified_base 17: mod_base = cm
  modified_base 18: mod_base = um
  modified_base 19: mod_base = um
  modified_base 20: mod_base = OTHER; note = 2'-O-methyladenosine
  modified_base 21: mod_base = OTHER; note = 2'-O-methyladenosine with a 3'-phosphorothioate linkage
  modified_base 22: mod_base = OTHER; note = 2'-O-methyluridine with a 3'-phosphorothioate linkage
  modified_base 23: mod_base = gm
tcaagtaaaataaaaacttaatg

SEQ ID NO: 380 - RNA, 23 nt, synthetic construct
  source 1..23: mol_type = other RNA
  modified_base 1: mod_base = OTHER; note = 2'-O-methyluridine with a 3'-phosphorothioate linkage
  modified_base 2: mod_base = OTHER; note = 2'-fluoroadenosine with a 3'-phosphorothioate linkage
  modified_base 3: mod_base = um
  modified_base 4: mod_base = um
  modified_base 5: mod_base = OTHER; note = 2'-fluorouridine
  modified_base 6: mod_base = um
  modified_base 7: mod_base = OTHER; note = 2'-fluorocytidine
  modified_base 8: mod_base = OTHER; note = 2'-O-methyladenosine
  modified_base 9: mod_base = cm
  modified_base 10: mod_base = OTHER; note = 2'-O-methyladenosine
  modified_base 11: mod_base = gm
  modified_base 12: mod_base = cm
  modified_base 13: mod_base = cm
  modified_base 14: mod_base = OTHER; note = 2'-fluoroadenosine
  modified_base 15: mod_base = cm
  modified_base 16: mod_base = OTHER; note = 2'-fluoroadenosine
  modified_base 17: mod_base = um
  modified_base 18: mod_base = cm
  modified_base 19: mod_base = um
  modified_base 20: mod_base = um
  modified_base 21: mod_base = OTHER; note = 2'-O-methylcytidine with a 3'-phosphorothioate linkage
  modified_base 22: mod_base = OTHER; note = 2'-O-methylcytidine with a 3'-phosphorothioate linkage
  modified_base 23: mod_base = cm
tattttcacagccacatcttccc

SEQ ID NO: 381 - RNA, 23 nt, synthetic construct
  source 1..23: mol_type = other RNA
  modified_base 1: mod_base = OTHER; note = 2'-O-methyluridine with a 3'-phosphorothioate linkage
  modified_base 2: mod_base = OTHER; note = 2'-fluoroadenosine with a 3'-phosphorothioate linkage
  modified_base 3: mod_base = gm
  modified_base 4: mod_base = OTHER; note = 2'-O-methyladenosine
  modified_base 5: mod_base = OTHER; note = 2'-fluoroguanosine
  modified_base 6: mod_base = OTHER; note = 2'-O-methyladenosine
  modified_base 7: mod_base = OTHER; note = 2'-fluorouridine
  modified_base 8: mod_base = um
  modified_base 9: mod_base = um
  modified_base 10: mod_base = cm
  modified_base 11: mod_base = um
  modified_base 12: mod_base = um
  modified_base 13: mod_base = um
  modified_base 14: mod_base = OTHER; note = 2'-fluorouridine
  modified_base 15: mod_base = um
  modified_base 16: mod_base = OTHER; note = 2'-fluoroadenosine
  modified_base 17: mod_base = OTHER; note = 2'-O-methyladenosine
  modified_base 18: mod_base = cm
  modified_base 19: mod_base = OTHER; note = 2'-O-methyladenosine
  modified_base 20: mod_base = um
  modified_base 21: mod_base = OTHER; note = 2'-O-methyladenosine with a 3'-phosphorothioate linkage
  modified_base 22: mod_base = OTHER; note = 2'-O-methyladenosine with a 3'-phosphorothioate linkage
  modified_base 23: mod_base = um
tagagatttctttttaacataat

SEQ ID NO: 382 - RNA, 23 nt, synthetic construct
  source 1..23: mol_type = other RNA
  modified_base 1: mod_base = OTHER; note = 2'-O-methyluridine with a 3'-phosphorothioate linkage
  modified_base 2: mod_base = OTHER; note = 2'-fluorouridine with a 3'-phosphorothioate linkage
  modified_base 3: mod_base = OTHER; note = 2'-O-methyladenosine
  modified_base 4: mod_base = OTHER; note = 2'-O-methyladenosine
  modified_base 5: mod_base = OTHER; note = 2'-fluorocytidine
  modified_base 6: mod_base = OTHER; note = 2'-O-methyladenosine
  modified_base 7: mod_base = OTHER; note = 2'-fluorouridine
  modified_base 8: mod_base = OTHER; note = 2'-O-methyladenosine
  modified_base 9: mod_base = OTHER; note = 2'-O-methyladenosine
  modified_base 10: mod_base = um
  modified_base 11: mod_base = um
  modified_base 12: mod_base = OTHER; note = 2'-O-methyladenosine
  modified_base 13: mod_base = um
  modified_base 14: mod_base = OTHER; note = 2'-fluorocytidine
  modified_base 15: mod_base = OTHER; note = 2'-O-methyladenosine
  modified_base 16: mod_base = OTHER; note = 2'-fluorouridine
  modified_base 17: mod_base = cm
  modified_base 18: mod_base = OTHER; note = 2'-O-methyladenosine
  modified_base 19: mod_base = um
  modified_base 20: mod_base = um
  modified_base 21: mod_base = OTHER; note = 2'-O-methyladenosine with a 3'-phosphorothioate linkage
  modified_base 22: mod_base = OTHER; note = 2'-O-methylguanosine with a 3'-phosphorothioate linkage
  modified_base 23: mod_base = gm
ttaacataattatcatcattagg

SEQ ID NO: 383 - RNA, 23 nt, synthetic construct
  source 1..23: mol_type = other RNA
  modified_base 1: mod_base = OTHER; note = 2'-O-methyluridine with a 3'-phosphorothioate linkage
  modified_base 2: mod_base = OTHER; note = 2'-fluorouridine with a 3'-phosphorothioate linkage
  modified_base 3: mod_base = um
  modified_base 4: mod_base = cm
  modified_base 5: mod_base = OTHER; note = 2'-fluorouridine
  modified_base 6: mod_base = um
  modified_base 7: mod_base = OTHER; note = 2'-fluorouridine
  modified_base 8: mod_base = um
  modified_base 9: mod_base = um
  modified_base 10: mod_base = OTHER; note = 2'-O-methyladenosine
  modified_base 11: mod_base = OTHER; note = 2'-O-methyladenosine
  modified_base 12: mod_base = cm
  modified_base 13: mod_base = OTHER; note = 2'-O-methyladenosine
  modified_base 14: mod_base = OTHER; note = 2'-fluorouridine
  modified_base 15: mod_base = OTHER; note = 2'-O-methyladenosine
  modified_base 16: mod_base = OTHER; note = 2'-fluoroadenosine
  modified_base 17: mod_base = um
  modified_base 18: mod_base = um
  modified_base 19: mod_base = OTHER; note = 2'-O-methyladenosine
  modified_base 20: mod_base = um
  modified_base 21: mod_base = OTHER; note = 2'-O-methylcytidine with a 3'-phosphorothioate linkage
  modified_base 22: mod_base = OTHER; note = 2'-O-methyladenosine with a 3'-phosphorothioate linkage
  modified_base 23: mod_base = um
tttctttttaacataattatcat

SEQ ID NO: 384 - RNA, 23 nt, synthetic construct
  source 1..23: mol_type = other RNA
  modified_base 1: mod_base = OTHER; note = 2'-O-methyluridine with a 3'-phosphorothioate linkage
  modified_base 2: mod_base = OTHER; note = 2'-fluorocytidine with a 3'-phosphorothioate linkage
  modified_base 3: mod_base = OTHER; note = 2'-O-methyladenosine
  modified_base 4: mod_base = um
  modified_base 5: mod_base = OTHER; note = 2'-fluorocytidine
  modified_base 6: mod_base = OTHER; note = 2'-O-methyladenosine
  modified_base 7: mod_base = OTHER; note = 2'-fluorouridine
  modified_base 8: mod_base = um
  modified_base 9: mod_base = OTHER; note = 2'-O-methyladenosine
  modified_base 10: mod_base = gm
  modified_base 11: mod_base = gm
  modified_base 12: mod_base = cm
  modified_base 13: mod_base = um
  modified_base 14: mod_base = OTHER; note = 2'-fluorouridine
  modified_base 15: mod_base = um
  modified_base 16: mod_base = OTHER; note = 2'-fluoroguanosine
  modified_base 17: mod_base = cm
  modified_base 18: mod_base = OTHER; note = 2'-O-methyladenosine
  modified_base 19: mod_base = gm
  modified_base 20: mod_base = um
  modified_base 21: mod_base = OTHER; note = 2'-O-methylcytidine with a 3'-phosphorothioate linkage
  modified_base 22: mod_base = OTHER; note = 2'-O-methyluridine with a 3'-phosphorothioate linkage
  modified_base 23: mod_base = um
tcatcattaggctttgcagtctt

SEQ ID NO: 385 - RNA, 23 nt, synthetic construct
  source 1..23: mol_type = other RNA
  modified_base 1: mod_base = OTHER; note = 2'-O-methyluridine with a 3'-phosphorothioate linkage
  modified_base 2: mod_base = OTHER; note = 2'-fluoroadenosine with a 3'-phosphorothioate linkage
  modified_base 3: mod_base = gm
  modified_base 4: mod_base = um
  modified_base 5: mod_base = OTHER; note = 2'-fluoroadenosine
  modified_base 6: mod_base = OTHER; note = 2'-O-methyladenosine
  modified_base 7: mod_base = OTHER; note = 2'-fluoroadenosine
  modified_base 8: mod_base = OTHER; note = 2'-O-methyladenosine
  modified_base 9: mod_base = um
  modified_base 10: mod_base = OTHER; note = 2'-O-methyladenosine
  modified_base 11: mod_base = OTHER; note = 2'-O-methyladenosine
  modified_base 12: mod_base = OTHER; note = 2'-O-methyladenosine
  modified_base 13: mod_base = OTHER; note = 2'-O-methyladenosine
  modified_base 14: mod_base = OTHER; note = 2'-fluoroadenosine
  modified_base 15: mod_base = cm
  modified_base 16: mod_base = OTHER; note = 2'-fluorouridine
  modified_base 17: mod_base = um
  modified_base 18: mod_base = OTHER; note = 2'-O-methyladenosine
  modified_base 19: mod_base = OTHER; note = 2'-O-methyladenosine
  modified_base 20: mod_base = um
  modified_base 21: mod_base = OTHER; note = 2'-O-methylguanosine with a 3'-phosphorothioate linkage
  modified_base 22: mod_base = OTHER; note = 2'-O-methyladenosine with a 3'-phosphorothioate linkage
  modified_base 23: mod_base = cm
tagtaaaataaaaacttaatgac

SEQ ID NO: 386 - RNA, 23 nt, synthetic construct
  source 1..23: mol_type = other RNA
  modified_base 1: mod_base = OTHER; note = 2'-O-methyluridine with a 3'-phosphorothioate linkage
  modified_base 2: mod_base = OTHER; note = 2'-fluorouridine with a 3'-phosphorothioate linkage
  modified_base 3: mod_base = um
  modified_base 4: mod_base = cm
  modified_base 5: mod_base = OTHER; note = 2'-fluorouridine
  modified_base 6: mod_base = um
  modified_base 7: mod_base = OTHER; note = 2'-fluoroadenosine
  modified_base 8: mod_base = OTHER; note = 2'-O-methyladenosine
  modified_base 9: mod_base = um
  modified_base 10: mod_base = OTHER; note = 2'-O-methyladenosine
  modified_base 11: mod_base = cm
  modified_base 12: mod_base = gm
  modified_base 13: mod_base = OTHER; note = 2'-O-methyladenosine
  modified_base 14: mod_base = OTHER; note = 2'-fluoroadenosine
  modified_base 15: mod_base = gm
  modified_base 16: mod_base = OTHER; note = 2'-fluoroadenosine
  modified_base 17: mod_base = gm
  modified_base 18: mod_base = cm
  modified_base 19: mod_base = OTHER; note = 2'-O-methyladenosine
  modified_base 20: mod_base = gm
  modified_base 21: mod_base = OTHER; note = 2'-O-methyluridine with a 3'-phosphorothioate linkage
  modified_base 22: mod_base = OTHER; note = 2'-O-methyluridine with a 3'-phosphorothioate linkage
  modified_base 23: mod_base = OTHER; note = 2'-O-methyladenosine
tttcttaatacgaagagcagtta

SEQ ID NO: 387 - RNA, 23 nt, synthetic construct
  source 1..23: mol_type = other RNA
  modified_base 1: mod_base = OTHER; note = 2'-O-methyluridine with a 3'-phosphorothioate linkage
  modified_base 2: mod_base = OTHER; note = 2'-fluoroguanosine with a 3'-phosphorothioate linkage
  modified_base 3: mod_base = OTHER; note = 2'-O-methyladenosine
  modified_base 4: mod_base = gm
  modified_base 5: mod_base = OTHER; note = 2'-fluoroadenosine
  modified_base 6: mod_base = um
  modified_base 7: mod_base = OTHER; note = 2'-fluorouridine
  modified_base 8: mod_base = um
  modified_base 9: mod_base = cm
  modified_base 10: mod_base = um
  modified_base 11: mod_base = um
  modified_base 12: mod_base = um
  modified_base 13: mod_base = um
  modified_base 14: mod_base = OTHER; note = 2'-fluorouridine
  modified_base 15: mod_base = OTHER; note = 2'-O-methyladenosine
  modified_base 16: mod_base = OTHER; note = 2'-fluoroadenosine
  modified_base 17: mod_base = cm
  modified_base 18: mod_base = OTHER; note = 2'-O-methyladenosine
  modified_base 19: mod_base = um
  modified_base 20: mod_base = OTHER; note = 2'-O-methyladenosine
  modified_base 21: mod_base = OTHER; note = 2'-O-methyladenosine with a 3'-phosphorothioate linkage
  modified_base 22: mod_base = OTHER; note = 2'-O-methyluridine with a 3'-phosphorothioate linkage
  modified_base 23: mod_base = um
tgagatttctttttaacataatt

SEQ ID NO: 388 - RNA, 23 nt, synthetic construct
  source 1..23: mol_type = other RNA
  modified_base 1: mod_base = OTHER; note = 2'-O-methyluridine with a 3'-phosphorothioate linkage
  modified_base 2: mod_base = OTHER; note = 2'-fluoroadenosine with a 3'-phosphorothioate linkage
  modified_base 3: mod_base = gm
  modified_base 4: mod_base = OTHER; note = 2'-O-methyladenosine
  modified_base 5: mod_base = OTHER; note = 2'-fluoroguanosine
  modified_base 6: mod_base = OTHER; note = 2'-O-methyladenosine
  modified_base 7: mod_base = OTHER; note = 2'-fluorouridine
  modified_base 8: mod_base = um
  modified_base 9: mod_base = gm
  modified_base 10: mod_base = gm
  modified_base 11: mod_base = OTHER; note = 2'-O-methyladenosine
  modified_base 12: mod_base = um
  modified_base 13: mod_base = gm
  modified_base 14: mod_base = OTHER; note = 2'-fluoroadenosine
  modified_base 15: mod_base = OTHER; note = 2'-O-methyladenosine
  modified_base 16: mod_base = OTHER; note = 2'-fluoroguanosine
  modified_base 17: mod_base = um
  modified_base 18: mod_base = cm
  modified_base 19: mod_base = OTHER; note = 2'-O-methyladenosine
  modified_base 20: mod_base = OTHER; note = 2'-O-methyladenosine
  modified_base 21: mod_base = OTHER; note = 2'-O-methylcytidine with a 3'-phosphorothioate linkage
  modified_base 22: mod_base = OTHER; note = 2'-O-methyluridine with a 3'-phosphorothioate linkage
  modified_base 23: mod_base = cm
tagagattggatgaagtcaactc

SEQ ID NO: 389 - RNA, 23 nt, synthetic construct
  source 1..23: mol_type = other RNA
  modified_base 1: mod_base = OTHER; note = 2'-O-methyluridine with a 3'-phosphorothioate linkage
  modified_base 2: mod_base = OTHER; note = 2'-fluoroguanosine with a 3'-phosphorothioate linkage
  modified_base 3: mod_base = um
  modified_base 4: mod_base = OTHER; note = 2'-O-methyladenosine
  modified_base 5: mod_base = OTHER; note = 2'-fluorouridine
  modified_base 6: mod_base = cm
  modified_base 7: mod_base = OTHER; note = 2'-fluoroadenosine
  modified_base 8: mod_base = um
  modified_base 9: mod_base = cm
  modified_base 10: mod_base = OTHER; note = 2'-O-methyladenosine
  modified_base 11: mod_base = OTHER; note = 2'-O-methyladenosine
  modified_base 12: mod_base = gm
  modified_base 13: mod_base = cm
  modified_base 14: mod_base = OTHER; note = 2'-fluoroadenosine
  modified_base 15: mod_base = um
  modified_base 16: mod_base = OTHER; note = 2'-fluorouridine
  modified_base 17: mod_base = um
  modified_base 18: mod_base = cm
  modified_base 19: mod_base = OTHER; note = 2'-O-methyladenosine
  modified_base 20: mod_base = gm
  modified_base 21: mod_base = OTHER; note = 2'-O-methylguanosine with a 3'-phosphorothioate linkage
  modified_base 22: mod_base = OTHER; note = 2'-O-methyladenosine with a 3'-phosphorothioate linkage
  modified_base 23: mod_base = gm
tgtatcatcaagcatttcaggag

SEQ ID NO: 390 - RNA, 23 nt, synthetic construct
  source 1..23: mol_type = other RNA
  modified_base 1: mod_base = OTHER; note = 2'-O-methyluridine with a 3'-phosphorothioate linkage
  modified_base 2: mod_base = OTHER; note = 2'-fluoroadenosine with a 3'-phosphorothioate linkage
  modified_base 3: mod_base = um
  modified_base 4: mod_base = um
  modified_base 5: mod_base = OTHER; note = 2'-fluoroguanosine
  modified_base 6: mod_base = um
  modified_base 7: mod_base = OTHER; note = 2'-fluoroadenosine
  modified_base 8: mod_base = um
  modified_base 9: mod_base = cm
  modified_base 10: mod_base = OTHER; note = 2'-O-methyladenosine
  modified_base 11: mod_base = um
  modified_base 12: mod_base = cm
  modified_base 13: mod_base = OTHER; note = 2'-O-methyladenosine
  modified_base 14: mod_base = OTHER; note = 2'-fluoroadenosine
  modified_base 15: mod_base = gm
  modified_base 16: mod_base = OTHER; note = 2'-fluorocytidine
  modified_base 17: mod_base = OTHER; note = 2'-O-methyladenosine
  modified_base 18: mod_base = um
  modified_base 19: mod_base = um
  modified_base 20: mod_base = um
  modified_base 21: mod_base = OTHER; note = 2'-O-methylcytidine with a 3'-phosphorothioate linkage
  modified_base 22: mod_base = OTHER; note = 2'-O-methyladenosine with a 3'-phosphorothioate linkage
  modified_base 23: mod_base = gm
tattgtatcatcaagcatttcag

SEQ ID NO: 391 - RNA, 23 nt, synthetic construct
  source 1..23: mol_type = other RNA
  modified_base 1: mod_base = OTHER; note = 2'-O-methyluridine with a 3'-phosphorothioate linkage
  modified_base 2: mod_base = OTHER; note = 2'-fluorouridine with a 3'-phosphorothioate linkage
  modified_base 3: mod_base = um
  modified_base 4: mod_base = cm
  modified_base 5: mod_base = OTHER; note = 2'-fluoroadenosine
  modified_base 6: mod_base = OTHER; note = 2'-O-methyladenosine
  modified_base 7: mod_base = OTHER; note = 2'-fluoroadenosine
  modified_base 8: mod_base = um
  modified_base 9: mod_base = OTHER; note = 2'-O-methyladenosine
  modified_base 10: mod_base = gm
  modified_base 11: mod_base = um
  modified_base 12: mod_base = cm
  modified_base 13: mod_base = OTHER; note = 2'-O-methyladenosine
  modified_base 14: mod_base = OTHER; note = 2'-fluorouridine
  modified_base 15: mod_base = OTHER; note = 2'-O-methyladenosine
  modified_base 16: mod_base = OTHER; note = 2'-fluorouridine
  modified_base 17: mod_base = OTHER; note = 2'-O-methyladenosine
  modified_base 18: mod_base = OTHER; note = 2'-O-methyladenosine
  modified_base 19: mod_base = gm
  modified_base 20: mod_base = gm
  modified_base 21: mod_base = OTHER; note = 2'-O-methyladenosine with a 3'-phosphorothioate linkage
  modified_base 22: mod_base = OTHER; note = 2'-O-methylguanosine with a 3'-phosphorothioate linkage
  modified_base 23: mod_base = cm
tttcaaatagtcatataaggagc

SEQ ID NO: 392 - protein, 31 aa, synthetic construct
  SITE 2: note = 2-Aminoisobutyric Acid
  SITE 20: note = Lys at position 20 is chemically modified through conjugation to the epsilon-amino group of the K side-chain with (gamma-Glu)-CO-(CH2)14-CH3
HXEGTFTSDVSSYLEGQAAKEFIAWLVRGRG

SEQ ID NO: 393 - RNA, 8666 nt, Mus musculus
  source 1..8666: mol_type = mRNA
agttccccttggctgggctctgaggactgaagtgtgtgtgtcttttgtgtgattcttcaaacttcacctgccaaacggaaggagcatgttgggcctccgtcatgctaaccaacgggaaagagcaggtgatcaaatcgtgtgtgtccctcccggaactaaatgctcaggtcttctgtcacagttccaacaacgtgaccaaaaccgaatgttgcttcacagacttctgcaacaatatcacactgcaccttcccacaggtctgcctctcttggttcaaagaacaatcgcaaggacaattgtacttcaagaaatcgtaggaaaaggtcggtttggggaagtgtggcacggaagatggtgtggagaagatgtggctgtgaaaatattctcctccagggatgagagatcttggttccgtgaggcggaaatttatcagacggtgatgctgagacacgagaacatcctcggtttcatcgcagctgacaacaaagataatggaacttggacacaactctggcttgtgtcagagtatcacgagcagggctccttgtatgactatttgaacagaaacatagtgactgtggctggaatggtcaagctggcgctttccatagcgagtggtctggctcacctgcacatggagatcgtgggtactcaaggtaagcctgctattgctcaccgagatataaagtcaaagaatatcctagtcaaaaaatgtgacacttgtgccatagctgacttagggctggctgtgaagcacgattctatcatgaacactatagacataccccagaatcctaaagtgggaaccaagaggtacatggctcccgaaatgcttgatgatacaatgaacctgagcatctttgagtccttcaagcgagctgacatctattcggtggggctggtttactgggaaatagctcgaaggtgttcagttggaggagttgttgaggagtaccagttgccttactatgacatggtgccttcagatccttcgatagaagaaatgaggaaggttgtctgtgatcagaaactccgaccaaatctcccaaaccagtggcaaagctgtgaagcgctgcgggtcatgggaagaataatgcgtgagtgctggtacgccaacggggcagcacgcctgacagccctgcgcgtgaagaagaccatctcccagctgtgtgtcaaggaagactgtaaagcttagctctgcgtacaggcaaaggaagagtgctcacagctttccttcccgtctcccgctttgtgtaaatgtttttgcttcttttctgctgtgttttattttagttctacctcaaggatgactcactacagtgttgaagtgtcccaaaggcagcatgtaaagataacgctaaagttaagcatgggcaggtcttgactttcccagtttccatgttgtccttagttttatgtttaaaggggacacgactcgttttttctttttatttaaggaggaagatgttatgagtataagataagctacatacaatggtaaaaaaaatattaaatttttgttgtacttgaaccaagagcatccacaaatgagatgaagacatatttaaaatgtgaactactgtatattatggtgaaatggaactgtaaaaattaactgggtccttaaaaagtaaattttgctcagaattttaacatctaaagagtggaaaggtggagtaacaaagtgacaccacgttctcaggacttgctttctctgcctatttgccactctgcatcactacgacagctgtccctaagtagttcgaaaaccacctgagccattactcctcctgatacataacagaggtccatatgtctcaaacactgtgaaatggcccagagtcacagagctcttgccagagctggttacgaaccctgtgacaactagcactgtgaagtttgctggccattatactcccttgaattcccatagagcgtttcttcccaagtgggaagatcaatcatcagttataatattttaaatttagtcacatagtgaatgcattgagtattttgtaagaccataatagattttctagaatttcagaaccaatctattagaatttcatcaaagaaatgtcatcattatcccattcgataatgaaaaaaaatgttttctgaacattgccaaatattgaccaattataaacatccattttctaaagatgtatgtcataagatgtcattgcttttgaggttcatggttggaaagaaaatgacagaaagataaacacggaaagaatttgaggagagttcagagaactctcccgaaggagtgtaaccccttactggtaacagaagatcacatcagtgattacaaggcattcctggccttttaacagggaccatgcatggaagggtttggaggatctacctctattctccatttttgaagttcagaatatttaacaggacaccagatatttctttcaaatgtcctataggctttagtgaagatggtttaactcaacgtctttcagtgttctgaaacagtttcccgaaccccattccttagaactttcatctacctagaagttgttagaatggatgtgcactctaacaaggtcttgaaaagtgatatgttaacatattctattctttgatagttctagcagcaaagacacattccatggatatttttaagggtaaatatttgattgtagcctttctattatgagtaaggtgaagttttactatctagcatcttctaaagcccaacatggtaaatgatgttgtgaagaatacgttatgtatcccataagagggtaacttgatgtctacatatcactatggagatatgctactcgatccatctcatttgactaagtggagataagagaaacaaaagctgacagctgtggagtttgcatgtacttccattctcagtcatgtcctcatccatttataagcacagggcaccccataacttacttgccacaatattgggtacaagagggaataacaagatagataggtcctgccctcggggattttaaagtctaatttgggagtggggaaagacatgtgagtatgagggaagcgagtaaattgacagataaaatatgcagtgggatgcctttgagttctatgtgacaatggcttctagaataggtcttaaaatcacttccaatttgcaacacatttagaagggatctttatttagatattacagcctaattatatcatcagcatcaaaaggtgcgcctacgtgaatggatgttaagaagaaccgtgcgaagggagagctggcttatgtctattatcttatttcacagtttctacatgacggcaatggaattatttacttcaatgattgtatccagatatccaatgaaaaaaacctactctatcctgttccattcaccactgttagggaagtatattttctagattttaaaagagggtgttgtaacatctttattttggtcattatgttttataatttatttcagggtatatacaaacataacttatattttcttggtttagatttcacagtggagaaatctgcacattggtacattttgagacttttgctcattattctgttgctgaactgtaatccctaagtgaataatcttaaagagcagagccacagaagtagtcagggaacaatagaagttgtagtttttgcttaactctcaacatagttctacatagatactgctcacttataaaaaatagagtaatttttagagcataaggcatatttactgtatatatctatgcagttcaattttgtattatgtgtttttgatggaatcttatgtaacacttggtccttgtaaattttgttacgagcaaaaatatcttcttaggttaggtgcaaagtgacaccattgctttgctccttatggatattttggctctgggtataacatagagcttaggaatgctattatgaatttttagtactgtatgcaaaaaatggtggggtttatatacagcatcacttcttgaaatacagaacgcattatttgttgtctacatttgagcatgaatttgttgccttataagtcctgcgttttgagtttgtaatcagtactgactctgttgtatgcatccttccacgtctaaaatatttggcatgtcacatctagaattcttaatttatgttctgccatgagagttaagtgaaacatgactgtcatgctctattttaagcgcagcacttgcttttcatctttatacttttcaattaactttgcattttaaatttccataattgtatgaaaatagtaacctgatcgcaatgtctgaagagtttcaaatcggcgtttattttaaaatgaaaaaaaaaaaactacaacacattcattagatcagaagttccacaatcacttattgttttgagtgcttcgtctattgcagaatgattaaataaaagaaatgtctactgtcctggaattttgccaccatgggacttactgagacagagcaaactcagggcaatcttggagtggaagcaaaagtcccagggaagaccgcagtgcactgcctgaaggcagggagcaggcatctgccatcatacaaggagcaagagaacaacttgaaattacttggcaggcaatgatttttgactgattcttgaaaggaaatatgaacatttacatggctaaattaattcatttaaaatgtggaaattttgatttctatcaagcagttagggaacaataacaaatgcatccaagttggttgctgaattcttcagtattcgtttcctttatgtaacttgaaaaactaatattatcaatcactcagaaatgtttatgcttagtgtcctaaaatggtgtcactgtagtttttgaagctcccctctctcttttttcacttgtggaatgtattatctccatgaataacaatactgtgttttaattccagatcctgatattcacttagattttattcactgtcttagtgaagacagtcatcattttaagggcttttaattttttttttttttgcaggattctttaaaactaaaccaaaaaagatagagaaacagatagatggacagaaagaaagaaagagagaaagaaaggaagaaaggaagaaggaagaaagaggcaaaggaagaaaatctagaaggcaaaacattcattaagtctagtattagtcagaatttctatagtgttcatgttcttctgaggatactgatgcaaactccctggtgcctggctttctctttaccctccaccttagcttcgtttcattatctttcttctactattaaacttgatgttctttcatcaccttccaaaattatagttacttcctaattatttttaaacatagctattatttaacttaatcattatagaattgcacatttataatggagaagaaatcccttagtgttctaaattcttttatatgtgccacagcacaaaatgaaaatgagaatgtaaaagttaaagggactctgagcctcagatcttggttctaatattttgtagacgaagaaactgaagaccggtcattagatggcagctaatggttgtagaaacacagtggtgacacctacttctgcagcctcgcccacgtttacaaattgaaaagtcaatcagcatggatttaacactgcttcatgcacatattaacatcacatgccattcagtgctggtggtcagaccctacttgttgatgcatttctattaaaatagatggcttaggccaaggtcactagggaaaaaatgaaaatagacaaagcaaaaacctaaaagttgttatcgagataggcagaaaagccatgaagcactgatgagtttggaaatgtaattgaagaaatttagtgtgtggagggttttagtgctggctggaggtgtagagcagaggccgagaggacttgcctcgaaagtgaaaagatttgggttcaattttcagcactggtaagagaaggaagataggaaggaggtaagaagggaaggaaggaagtgaggaaggaagaaaggaggaaaggaaggataaaagaaagcattcttagtatgaataatgattatcgaagcctctggaccttccttgctcccttcctgaatgcattgttcctttcccttgtgtgttggaatggtgaaaggtgatttggtacacgaactggagactatgtttagtgtcatttatagtctctctcttgtttgttttgtctttgacatcattgtctcccctggtggcagatttcctgagccctgcccccaccactctactcagctctgtcctttcatgtatttgagccctgtccagactgttacacacggaacgtcttaacaaggttttaatttccccactgtgtataagaggcctcggctcaccagttcattagtgatcgttctcctgacactgggaagagggctctgttaatggcagacatgactttctttctcttccattttagtcagactgtctggttatcttgtagcttttggctagtgcataaagaatgtccgcttctgctttcatgctgaactcagcttcaacagcgacttgaacaaagactgtgaaatacatatcccataatgtgattgctcatgttacgcctgtgataattgagccattggtttgttttattcctgccatcctttgaaatatttttatttatttatttttatgtgttatgggagttttgattgaatgtgggtctgtgtaccatatgcatatccggtgcttgggtaggccaaaagagtctgatcccctgaaactagaattacaggtagttgtaagctgccatgtgggtgctggaaaccagaacttggtcctctggaagagcatcagccagtgcttctaactgctaagccatctctcttctgcttctgccatgtttttagactaagccatgtgccatgctgcttagaatgcagattatgctgaaattaggtaacgatctccactttaaaatttgatattgatagctgccaggattctcctgcagttagtcatagatgaacacaacatttgggagaatatgagctccagctcatcctcattttaataatgccagaaatgtatttttctccttgttggtttatgttacactacaagaaaatttcctcctggacccaacactttcattggaatatgcaattcttccccgggttttaggaatctgactgttcacacagcctgagtgtggtaggaaattcacctttctttccagcatcccacatataaattctccacagggaactcaacagattggggcagctgaggactggggtgagcgctggaactagctcttccctatagagacagttctagaccttacagagaaagacattgtgtgtttctatatcaacataaaatgcccaggcttatccatcattatgaaatagatgctaaatttagaaatggttcttgacatatgcaaactgaacacagaatttggaagaatagaatactctgacttttcttctctgtattcccaagagtaacaagagtaacaaggtggactctttatcctggtgatgggtgtatcttttccccaacctaagtcattggctgcaaggcacagtaacctcaatttctatacatccaccaagttttcattctgtggatgaacctactcatttgcttcacctgtaaagggaggcttgagtgtcaggctctaagaaagttaaccatactaagagatttatcaatatgtttggtttttcattggcagaacagtagtatctaggcaattttaaagatgtagcagtttcctgttctctttaccaagtgagagaatctgagtaaaatattagactccagttcatttctagaatggcttatatcaagctcttgtactctcctgaccctgaactggataggattgtttacacttgattgttgtttcaggttttaaaagggtctcaaaagaaaaaattggattcaggtctataaaaaaaaaaaaggattttgtattaattttcaaagcactaatactaattatacttttcttggggtagtgattctcttcttatacctaagaacatattacacatgtcaaaaccattgcattttgacattgcgaaacacaccttgaactcttgaactactgtgagcagaatcactgttgtaaagatttttttttttttttttttttttggtaagcttgctggtattcttaagtatgtaaaaagatgtcggcttccacaggctcaaatgaatgtacataaggactgtgaaaaaaaaataaattgggttttaaaataagaactgggcgataaattgtatctaaactgcgcagatgggcatcgtcgtgcggctgtgttttcattgttgaaggttgaacagagttctacagagtcgtggatgacattcagatgtttcatgacttttggatctgcgaacatatgcattttatagtcatgtatacttatattgttaagaaataatcatattttagaatttagtaagaactcagtgatagccttcataccaaaatgtttaactttgccaacagctagtcataaaaaagtatttattttaaagctttttaatacaattgcataacttcttgccgcctccaggtgtacattcttctctgcctaaatgttatatttttatgtatgcattttcagaaagcatattgttttggaaagtggcaaagacaatgaattaagcactcgttgcacttgtttctgtaaagcataaagagctctattttaaataaaagaaaacgtgtcataaaaaaaaa

SEQ ID NO: 394 - protein, 363 aa, Mus musculus
MLTNGKEQVIKSCVSLPELNAQVFCHSSNNVTKTECCFTDFCNNITLHLPTGLPLLVQRTIARTIVLQEIVGKGRFGEVWHGRWCGEDVAVKIFSSRDERSWFREAEIYQTVMLRHENILGFIAADNKDNGTWTQLWLVSEYHEQGSLYDYLNRNIVTVAGMVKLALSIASGLAHLHMEIVGTQGKPAIAHRDIKSKNILVKKCDTCAIADLGLAVKHDSIMNTIDIPQNPKVGTKRYMAPEMLDDTMNLSIFESFKRADIYSVGLVYWEIARRCSVGGVVEEYQLPYYDMVPSDPSIEEMRKVVCDQKLRPNLPNQWQSCEALRVMGRIMRECWYANGAARLTALRVKKTISQLCVKEDCKA

SEQ ID NO: 395 - protein, 41 aa, synthetic construct
  SITE 31: note = D-phenylalanine
  SITE 33: note = D-proline
  SITE 34: note = Beta-cyclohexyl-L-alanine
  SITE 35: note = D-alanine
  SITE 41: note = Amidated isoleucine
GGGGEGGGGEGGGGEKEKEKGGGGSGGGGSFSPXAGPIDRI

SEQ ID NO: 396 - RNA, 21 nt, synthetic construct
  source 1..21: mol_type = other RNA
cttgatgatacaatgaatgta

SEQ ID NO: 397 - RNA, 21 nt, synthetic construct
  source 1..21: mol_type = other RNA
tgcttgatgatacaatgaata

SEQ ID NO: 398 - RNA, 21 nt, synthetic construct
  source 1..21: mol_type = other RNA
tgttagcatataatgtattta

SEQ ID NO: 399 - RNA, 21 nt, synthetic construct
  source 1..21: mol_type = other RNA
tcattaagtttttattttaca

SEQ ID NO: 400 - RNA, 21 nt, synthetic construct
  source 1..21: mol_type = other RNA
agactgcaaagcctaatgata

SEQ ID NO: 401 - RNA, 21 nt, synthetic construct
  source 1..21: mol_type = other RNA
ggaagatgtggctgtgaaaaa

SEQ ID NO: 402 - RNA, 21 nt, synthetic construct
  source 1..21: mol_type = other RNA
tagaggaaatgagaaaggtta

SEQ ID NO: 403 - RNA, 21 nt, synthetic construct
  source 1..21: mol_type = other RNA
ggtgatgcaatctatgtttca

SEQ ID NO: 404 - RNA, 21 nt, synthetic construct
  source 1..21: mol_type = other RNA
ttctacctcaaagataagaca

SEQ ID NO: 405 - RNA, 21 nt, synthetic construct
  source 1..21: mol_type = other RNA
taactgctcttcgtattaaga

SEQ ID NO: 406 - RNA, 21 nt, synthetic construct
  source 1..21: mol_type = other RNA
aggtaaacctgctattgctca

SEQ ID NO: 407 - RNA, 21 nt, synthetic construct
  source 1..21: mol_type = other RNA
tttccattttcccctttatga

SEQ ID NO: 408 - RNA, 21 nt, synthetic construct
  source 1..21: mol_type = other RNA
gctggtatctgaatatcatga

SEQ ID NO: 409 - RNA, 21 nt, synthetic construct
  source 1..21: mol_type = other RNA
aatatattacaaaagtataaa

SEQ ID NO: 410 - RNA, 21 nt, synthetic construct
  source 1..21: mol_type = other RNA
attatgttaaaaagaaatcta

SEQ ID NO: 411 - RNA, 21 nt, synthetic construct
  source 1..21: mol_type = other RNA
actatatctcaactttgtgta

SEQ ID NO: 412 - RNA, 21 nt, synthetic construct
  source 1..21: mol_type = other RNA
ggagttgacttcatccaatca

SEQ ID NO: 413 - RNA, 21 nt, synthetic construct
  source 1..21: mol_type = other RNA
aaaataaatattgctctaaaa

SEQ ID NO: 414 - RNA, 21 nt, synthetic construct
  source 1..21: mol_type = other RNA
ctgtcatagttccaacaatga

SEQ ID NO: 415 - RNA, 21 nt, synthetic construct
  source 1..21: mol_type = other RNA
gcctaatgatgataattatga

SEQ ID NO: 416 - RNA, 21 nt, synthetic construct
  source 1..21: mol_type = other RNA
ataactctaaagttaagcata

SEQ ID NO: 417 - RNA, 21 nt, synthetic construct
  source 1..21: mol_type = other RNA
taattttattttgaaagcaaa

SEQ ID NO: 418 - RNA, 21 nt, synthetic construct
  source 1..21: mol_type = other RNA
aagataagacagtacagtata

SEQ ID NO: 419 - RNA, 21 nt, synthetic construct
  source 1..21: mol_type = other RNA
atgataattatgttaaaaaga

SEQ ID NO: 420 - RNA, 21 nt, synthetic construct
  source 1..21: mol_type = other RNA
tctcaactttgtgtcaaagaa

SEQ ID NO: 421 - RNA, 21 nt, synthetic construct
  source 1..21: mol_type = other RNA
ttttttgttctacctcaaaga

SEQ ID NO: 422 - RNA, 21 nt, synthetic construct
  source 1..21: mol_type = other RNA
attacaaaagtataaaataaa

SEQ ID NO: 423 - RNA, 21 nt, synthetic construct
  source 1..21: mol_type = other RNA
aaagcctaatgatgataatta

SEQ ID NO: 424 - RNA, 21 nt, synthetic construct
  source 1..21: mol_type = other RNA
ctcatagctttcttttccata

SEQ ID NO: 425 - RNA, 21 nt, synthetic construct
  source 1..21: mol_type = other RNA
gcatataatgtattttgaaga

SEQ ID NO: 426 - RNA, 21 nt, synthetic construct
  source 1..21: mol_type = other RNA
ctgctcttcgtattaagaaga

SEQ ID NO: 427 - RNA, 21 nt, synthetic construct
  source 1..21: mol_type = other RNA
gtttttattttacttgaacca

SEQ ID NO: 428 - RNA, 21 nt, synthetic construct
  source 1..21: mol_type = other RNA
ccattttcccctttatgtgaa

SEQ ID NO: 429 - RNA, 21 nt, synthetic construct
  source 1..21: mol_type = other RNA
atattacaaaagtataaaata

SEQ ID NO: 430 - RNA, 21 nt, synthetic construct
  source 1..21: mol_type = other RNA
gctcctgaaatgcttgatgaa

SEQ ID NO: 431 - RNA, 21 nt, synthetic construct
  source 1..21: mol_type = other RNA
ataattatgttaaaaagaaaa

SEQ ID NO: 432 - RNA, 21 nt, synthetic construct
  source 1..21: mol_type = other RNA
tgatgataattatgttaaaaa

SEQ ID NO: 433 - RNA, 21 nt, synthetic construct
  source 1..21: mol_type = other RNA
actgcaaagcctaatgatgaa

SEQ ID NO: 434 - RNA, 21 nt, synthetic construct
  source 1..21: mol_type = other RNA
acacaaggtaaacctgctata

SEQ ID NO: 435 - RNA, 21 nt, synthetic construct
  source 1..21: mol_type = other RNA
tgataattatgttaaaaagaa

SEQ ID NO: 436 - RNA, 21 nt, synthetic construct
  source 1..21: mol_type = other RNA
aagactgcaaagcctaatgaa

SEQ ID NO: 437 - RNA, 21 nt, synthetic construct
  source 1..21: mol_type = other RNA
aaatatattacaaaagtataa

SEQ ID NO: 438 - RNA, 21 nt, synthetic construct
  source 1..21: mol_type = other RNA
aactgctcttcgtattaagaa

SEQ ID NO: 439 - RNA, 21 nt, synthetic construct
  source 1..21: mol_type = other RNA
cctcaaagataagacagtaca

SEQ ID NO: 440 - RNA, 21 nt, synthetic construct
  source 1..21: mol_type = other RNA
ttacttgaaccaagagcacaa

SEQ ID NO: 441 - RNA, 21 nt, synthetic construct
  source 1..21: mol_type = other RNA
tatctcaactttgtgtcaaaa

SEQ ID NO: 442 - RNA, 21 nt, synthetic construct
  source 1..21: mol_type = other RNA
tgcaaagcctaatgatgataa

SEQ ID NO: 443 - RNA, 21 nt, synthetic construct
  source 1..21: mol_type = other RNA
tattacaaaagtataaaataa

SEQ ID NO: 444 - RNA, 21 nt, synthetic construct
  source 1..21: mol_type = other RNA
tggtatctgaatatcatgaaa

SEQ ID NO: 445 - RNA, 21 nt, synthetic construct
  source 1..21: mol_type = other RNA
gtctgtcatagttccaacaat

SEQ ID NO: 446 - RNA, 21 nt, synthetic construct
  source 1..21: mol_type = other RNA
atgaatgtgaatatgtttgaa

SEQ ID NO: 447 - RNA, 21 nt, synthetic construct
  source 1..21: mol_type = other RNA
atgattgtgaatatctttgaa

SEQ ID NO: 448 - RNA, 21 nt, synthetic construct
  source 1..21: mol_type = other RNA
ggctcctgaaatgcctgatga

SEQ ID NO: 449 - RNA, 21 nt, synthetic construct
  source 1..21: mol_type = other RNA
catagctttcttttccattta

SEQ ID NO: 450 - RNA, 21 nt, synthetic construct
  source 1..21: mol_type = other RNA
ttgatgatacaatgcatgtga

SEQ ID NO: 451 - RNA, 21 nt, synthetic construct
  source 1..21: mol_type = other RNA
ttcaaacgagctgagatctaa

SEQ ID NO: 452 - RNA, 21 nt, synthetic construct
  source 1..21: mol_type = other RNA
ttcatacgagctgacatctaa

SEQ ID NO: 453 - RNA, 19 nt, synthetic construct
  source 1..19: mol_type = other RNA
atctcaactttgtgtcaaa

SEQ ID NO: 454 - RNA, 20 nt, synthetic construct
  source 1..20: mol_type = other RNA
tatctcaactttgtgtcaaa

SEQ ID NO: 455 - RNA, 22 nt, synthetic construct
  source 1..22: mol_type = other RNA
tatatctcaactttgtgtcaaa

SEQ ID NO: 456 - RNA, 23 nt, synthetic construct
  source 1..23: mol_type = other RNA
ctatatctcaactttgtgtcaaa

SEQ ID NO: 457 - RNA, 23 nt, synthetic construct
  source 1..23: mol_type = other RNA
tacattcattgtatcatcaagca

SEQ ID NO: 458 - RNA, 23 nt, synthetic construct
  source 1..23: mol_type = other RNA
tattcattgtatcatcaagcatt

SEQ ID NO: 459 - RNA, 23 nt, synthetic construct
  source 1..23: mol_type = other RNA
taaatacattatatgctaacatg

SEQ ID NO: 460 - RNA, 23 nt, synthetic construct
  source 1..23: mol_type = other RNA
tgtaaaataaaaacttaatgact

SEQ ID NO: 461 - RNA, 23 nt, synthetic construct
  source 1..23: mol_type = other RNA
tatcattaggctttgcagtcttc

SEQ ID NO: 462 - RNA, 23 nt, synthetic construct
  source 1..23: mol_type = other RNA
tttttcacagccacatcttcccc

SEQ ID NO: 463 - RNA, 23 nt, synthetic construct
  source 1..23: mol_type = other RNA
taacctttctcatttcctctatc

SEQ ID NO: 464 - RNA, 23 nt, synthetic construct
  source 1..23: mol_type = other RNA
tgaaacatagattgcatcaccta

SEQ ID NO: 465 - RNA, 23 nt, synthetic construct
  source 1..23: mol_type = other RNA
tgtcttatctttgaggtagaaca

SEQ ID NO: 466 - RNA, 23 nt, synthetic construct
  source 1..23: mol_type = other RNA
tcttaatacgaagagcagttagg

SEQ ID NO: 467 - RNA, 23 nt, synthetic construct
  source 1..23: mol_type = other RNA
tgagcaatagcaggtttaccttg

SEQ ID NO: 468 - RNA, 23 nt, synthetic construct
  source 1..23: mol_type = other RNA
tcataaaggggaaaatggaaaag

SEQ ID NO: 469 - RNA, 23 nt, synthetic construct
  source 1..23: mol_type = other RNA
tcatgatattcagataccagcca

SEQ ID NO: 470 - RNA, 23 nt, synthetic construct
  source 1..23: mol_type = other RNA
tttatacttttgtaatatatttc

SEQ ID NO: 471 - RNA, 23 nt, synthetic construct
  source 1..23: mol_type = other RNA
tagatttctttttaacataatta

SEQ ID NO: 472 - RNA, 23 nt, synthetic construct
  source 1..23: mol_type = other RNA
tacacaaagttgagatatagtct

SEQ ID NO: 473 - RNA, 23 nt, synthetic construct
  source 1..23: mol_type = other RNA
tgattggatgaagtcaactcctg

SEQ ID NO: 474 - RNA, 23 nt, synthetic construct
  source 1..23: mol_type = other RNA
ttttagagcaatatttattttta

SEQ ID NO: 475 - RNA, 23 nt, synthetic construct
  source 1..23: mol_type = other RNA
tcattgttggaactatgacagaa

SEQ ID NO: 476 - RNA, 23 nt, synthetic construct
  source 1..23: mol_type = other RNA
tcataattatcatcattaggctt

SEQ ID NO: 477 - RNA, 23 nt, synthetic construct
  source 1..23: mol_type = other RNA
tatgcttaactttagagttatct

SEQ ID NO: 478 - RNA, 23 nt, synthetic construct
  source 1..23: mol_type = other RNA
tttgctttcaaaataaaattaaa

SEQ ID NO: 479 - RNA, 23 nt, synthetic construct
  source 1..23: mol_type = other RNA
tatactgtactgtcttatctttg

SEQ ID NO: 480 - RNA, 23 nt, synthetic construct
  source 1..23: mol_type = other RNA
tctttttaacataattatcatca

SEQ ID NO: 481 - RNA, 23 nt, synthetic construct
  source 1..23: mol_type = other RNA
ttctttgacacaaagttgagata

SEQ ID NO: 482 - RNA, 23 nt, synthetic construct
  source 1..23: mol_type = other RNA
tctttgaggtagaacaaaaaaaa

SEQ ID NO: 483 - RNA, 23 nt, synthetic construct
  source 1..23: mol_type = other RNA
tttattttatacttttgtaatat

SEQ ID NO: 484 - RNA, 23 nt, synthetic construct
  source 1..23: mol_type = other RNA
taattatcatcattaggctttgc

SEQ ID NO: 485 - RNA, 23 nt, synthetic construct
  source 1..23: mol_type = other RNA
tatggaaaagaaagctatgagag

SEQ ID NO: 486 - RNA, 23 nt, synthetic construct
  source 1..23: mol_type = other RNA
tcttcaaaatacattatatgcta

SEQ ID NO: 487 - RNA, 23 nt, synthetic construct
  source 1..23: mol_type = other RNA
tcttcttaatacgaagagcagtt

SEQ ID NO: 488 - RNA, 23 nt, synthetic construct
  source 1..23: mol_type = other RNA
tggttcaagtaaaataaaaactt

SEQ ID NO: 489 - RNA, 23 nt, synthetic construct
  source 1..23: mol_type = other RNA
ttcacataaaggggaaaatggaa

SEQ ID NO: 490 - RNA, 23 nt, synthetic construct
  source 1..23: mol_type = other RNA
tattttatacttttgtaatatat

SEQ ID NO: 491 - RNA, 23 nt, synthetic construct
  source 1..23: mol_type = other RNA
ttcatcaagcatttcaggagcca

SEQ ID NO: 492 - RNA, 23 nt, synthetic construct
  source 1..23: mol_type = other RNA
ttttctttttaacataattatca

SEQ ID NO: 493 - RNA, 23 nt, synthetic construct
  source 1..23: mol_type = other RNA
tttttaacataattatcatcatt

SEQ ID NO: 494 - RNA, 23 nt, synthetic construct
  source 1..23: mol_type = other RNA
ttcatcattaggctttgcagtct

SEQ ID NO: 495 - RNA, 23 nt, synthetic construct
  source 1..23: mol_type = other RNA
tatagcaggtttaccttgtgtac

SEQ ID NO: 496 - RNA, 23 nt, synthetic construct
  source 1..23: mol_type = other RNA
ttctttttaacataattatcatc

SEQ ID NO: 497 - RNA, 23 nt, synthetic construct
  source 1..23: mol_type = other RNA
ttcattaggctttgcagtcttct

SEQ ID NO: 498 - RNA, 23 nt, synthetic construct
  source 1..23: mol_type = other RNA
ttatacttttgtaatatatttct

SEQ ID NO: 499 - RNA, 23 nt, synthetic construct
  source 1..23: mol_type = other RNA
ttcttaatacgaagagcagttag

SEQ ID NO: 500 - RNA, 23 nt, synthetic construct
  source 1..23: mol_type = other RNA
tgtactgtcttatctttgaggta

SEQ ID NO: 501 - RNA, 23 nt, synthetic construct
  source 1..23: mol_type = other RNA
ttgtgctcttggttcaagtaaaa

SEQ ID NO: 502 - RNA, 23 nt, synthetic construct
  source 1..23: mol_type = other RNA
ttttgacacaaagttgagatata

SEQ ID NO: 503 - RNA, 23 nt, synthetic construct
  source 1..23: mol_type = other RNA
ttatcatcattaggctttgcagt

SEQ ID NO: 504 - RNA, 23 nt, synthetic construct
  source 1..23: mol_type = other RNA
ttattttatacttttgtaatata

SEQ ID NO: 505 - RNA, 23 nt, synthetic construct
  source 1..23: mol_type = other RNA
tttcatgatattcagataccagc

SEQ ID NO: 506 - RNA, 21 nt, synthetic construct
  source 1..21: mol_type = other RNA
attgttggaactatgacagac

SEQ ID NO: 507 - RNA, 23 nt, synthetic construct
  source 1..23: mol_type = other RNA
ttcaaacatattcacattcattg

SEQ ID NO: 508 - RNA, 23 nt, synthetic construct
  source 1..23: mol_type = other RNA
  modified_base 7: mod_base = OTHER; note = Inosine
ttcaaanatattcacattcattg

SEQ ID NO: 509 - RNA, 23 nt, synthetic construct
  source 1..23: mol_type = other RNA
ttcaaagatattcacaatcattg

SEQ ID NO: 510 - RNA, 21 nt, synthetic construct
  source 1..21: mol_type = other RNA
tacataaaggggaaaatggaa

SEQ ID NO: 511 - RNA, 23 nt, synthetic construct
  source 1..23: mol_type = other RNA
  modified_base 7: mod_base = OTHER; note = Inosine
tcatcangcatttcaggagccat

SEQ ID NO: 512 - RNA, 23 nt, synthetic construct
  source 1..23: mol_type = other RNA
taaatggaaaagaaagctatgag

SEQ ID NO: 513 - RNA, 23 nt, synthetic construct
  source 1..23: mol_type = other RNA
  modified_base 7: mod_base = OTHER; note = Inosine
tcacatncattgtatcatcaagc

SEQ ID NO: 514 - RNA, 23 nt, synthetic construct
  source 1..23: mol_type = other RNA
ttagatctcagctcgtttgaagg

SEQ ID NO: 515 - RNA, 23 nt, synthetic construct
  source 1..23: mol_type = other RNA
ttagatgtcagctcgtatgaagg

SEQ ID NO: 516 - RNA, 23 nt, synthetic construct
  source 1..23: mol_type = other RNA
  modified_base 7: mod_base = OTHER; note = Inosine
ttagatntcagctcgtttgaagg

SEQ ID NO: 517 - RNA, 21 nt, synthetic construct
  source 1..21: mol_type = other RNA
tttgacacaaagttgagatat

SEQ ID NO: 518 - RNA, 22 nt, synthetic construct
  source 1..22: mol_type = other RNA
tttgacacaaagttgagatata

SEQ ID NO: 519 - RNA, 21 nt, synthetic construct
  source 1..21: mol_type = other RNA
  modified_base 1: mod_base = OTHER; note = 2'-O-methylcytidine with a 3'-phosphorothioate linkage
  modified_base 2: mod_base = OTHER; note = 2'-O-methyluridine with a 3'-phosphorothioate linkage
  modified_base 3: mod_base = um
  modified_base 4: mod_base = gm
  modified_base 5: mod_base = OTHER; note = 2'-O-methyladenosine
  modified_base 6: mod_base = um
  modified_base 7: mod_base = gm
  modified_base 8: mod_base = OTHER; note = 2'-O-methyladenosine
  modified_base 9: mod_base = OTHER; note = 2'-fluorouridine
  modified_base 10: mod_base = OTHER; note = 2'-fluoroadenosine
  modified_base 11: mod_base = OTHER; note = 2'-fluorocytidine
  modified_base 12: mod_base = OTHER; note = 2'-O-methyladenosine
  modified_base 13: mod_base = OTHER; note = 2'-O-methyladenosine
  modified_base 14: mod_base = um
  modified_base 15: mod_base = gm
  modified_base 16: mod_base = OTHER; note = 2'-O-methyladenosine
  modified_base 17: mod_base = OTHER; note = 2'-O-methyladenosine
  modified_base 18: mod_base = um
  modified_base 19: mod_base = OTHER; note = 2'-O-methylguanosine with a 3'-phosphorothioate linkage
  modified_base 20: mod_base = OTHER; note = 2'-O-methyluridine with a 3'-phosphorothioate linkage
  modified_base 21: mod_base = OTHER; note = 2'-O-methyladenosine
cttgatgatacaatgaatgta

SEQ ID NO: 520 - RNA, 21 nt, synthetic construct
  source 1..21: mol_type = other RNA
  modified_base 1: mod_base = OTHER; note = 2'-O-methyluridine with a 3'-phosphorothioate linkage
  modified_base 2: mod_base = OTHER; note = 2'-O-methylguanosine with a 3'-phosphorothioate linkage
  modified_base 3: mod_base = cm
  modified_base 4: mod_base = um
  modified_base 5: mod_base = um
  modified_base 6: mod_base = gm
  modified_base 7: mod_base = OTHER; note = 2'-O-methyladenosine
  modified_base 8: mod_base = um
  modified_base 9: mod_base = OTHER; note = 2'-fluoroguanosine
  modified_base 10: mod_base = OTHER; note = 2'-fluoroadenosine
  modified_base 11: mod_base = OTHER; note = 2'-fluorouridine
  modified_base 12: mod_base = OTHER; note = 2'-O-methyladenosine
  modified_base 13: mod_base = cm
  modified_base 14: mod_base = OTHER; note = 2'-O-methyladenosine
  modified_base 15: mod_base = OTHER; note = 2'-O-methyladenosine
  modified_base 16: mod_base = um
  modified_base 17: mod_base = gm
  modified_base 18: mod_base = OTHER; note = 2'-O-methyladenosine
  modified_base 19: mod_base = OTHER; note = 2'-O-methyladenosine with a 3'-phosphorothioate linkage
  modified_base 20: mod_base = OTHER; note = 2'-O-methyluridine with a 3'-phosphorothioate linkage
  modified_base 21: mod_base = OTHER; note = 2'-O-methyladenosine
tgcttgatgatacaatgaata

SEQ ID NO: 521 - RNA, 21 nt, synthetic construct
  source 1..21: mol_type = other RNA
  modified_base 1: mod_base = OTHER; note = 2'-O-methyluridine with a 3'-phosphorothioate linkage
  modified_base 2: mod_base = OTHER; note = 2'-O-methylguanosine with a 3'-phosphorothioate linkage
  modified_base 3: mod_base = um
  modified_base 4: mod_base = um
  modified_base 5: mod_base = OTHER; note = 2'-O-methyladenosine
  modified_base 6: mod_base = gm
  modified_base 7: mod_base = cm
  modified_base 8: mod_base = OTHER; note = 2'-O-methyladenosine
  modified_base 9: mod_base = OTHER; note = 2'-fluorouridine
  modified_base 10: mod_base = OTHER; note = 2'-fluoroadenosine
  modified_base 11: mod_base = OTHER; note = 2'-fluorouridine
  modified_base 12: mod_base = OTHER; note = 2'-O-methyladenosine
  modified_base 13: mod_base = OTHER; note = 2'-O-methyladenosine
  modified_base 14: mod_base = um
  modified_base 15: mod_base = gm
  modified_base 16: mod_base = um
  modified_base 17: mod_base = OTHER; note = 2'-O-methyladenosine
  modified_base 18: mod_base = um
  modified_base 19: mod_base = OTHER; note = 2'-O-methyluridine with a 3'-phosphorothioate linkage
  modified_base 20: mod_base = OTHER; note = 2'-O-methyluridine with a 3'-phosphorothioate linkage
  modified_base 21: mod_base = OTHER; note = 2'-O-methyladenosine
tgttagcatataatgtattta

SEQ ID NO: 522 - RNA, 21 nt, synthetic construct
  source 1..21: mol_type = other RNA
  modified_base 1: mod_base = OTHER; note = 2'-O-methyluridine with a 3'-phosphorothioate linkage
  modified_base 2: mod_base = OTHER; note = 2'-O-methylcytidine with a 3'-phosphorothioate linkage
  modified_base 3: mod_base = OTHER; note = 2'-O-methyladenosine
  modified_base 4: mod_base = um
  modified_base 5: mod_base = um
  modified_base 6: mod_base = OTHER; note = 2'-O-methyladenosine
  modified_base 7: mod_base = OTHER; note = 2'-O-methyladenosine
  modified_base 8: mod_base = gm
  modified_base 9: mod_base = OTHER; note = 2'-fluorouridine
  modified_base 10: mod_base = OTHER; note = 2'-fluorouridine
  modified_base 11: mod_base = OTHER; note = 2'-fluorouridine
  modified_base 12: mod_base = um
  modified_base 13: mod_base = um
  modified_base 14: mod_base = OTHER; note = 2'-O-methyladenosine
  modified_base 15: mod_base = um
  modified_base 16: mod_base = um
  modified_base 17: mod_base = um
  modified_base 18: mod_base = um
  modified_base 19: mod_base = OTHER; note = 2'-O-methyladenosine with a 3'-phosphorothioate linkage
  modified_base 20: mod_base = OTHER; note = 2'-O-methylcytidine with a 3'-phosphorothioate linkage
  modified_base 21: mod_base = OTHER; note = 2'-O-methyladenosine
tcattaagtttttattttaca

SEQ ID NO: 523 - RNA, 21 nt, synthetic construct
  source 1..21: mol_type = other RNA
  modified_base 1: mod_base = OTHER; note = 2'-O-methyladenosine with a 3'-phosphorothioate linkage
  modified_base 2: mod_base = OTHER; note = 2'-O-methylguanosine with a 3'-phosphorothioate linkage
  modified_base 3: mod_base = OTHER; note = 2'-O-methyladenosine
  modified_base 4: mod_base = cm
  modified_base 5: mod_base = um
  modified_base 6: mod_base = gm
  modified_base 7: mod_base = cm
  modified_base 8: mod_base = OTHER; note = 2'-O-methyladenosine
  modified_base 9: mod_base = OTHER; note = 2'-fluoroadenosine
  modified_base 10: mod_base = OTHER; note = 2'-fluoroadenosine
  modified_base 11: mod_base = OTHER; note = 2'-fluoroguanosine
  modified_base 12: mod_base = cm
  modified_base 13: mod_base = cm
  modified_base 14: mod_base = um
  modified_base 15: mod_base = OTHER; note = 2'-O-methyladenosine
  modified_base 16: mod_base = OTHER; note = 2'-O-methyladenosine
  modified_base 17: mod_base = um
  modified_base 18: mod_base = gm
  modified_base 19: mod_base = OTHER; note = 2'-O-methyladenosine with a 3'-phosphorothioate linkage
  modified_base 20: mod_base = OTHER; note = 2'-O-methyluridine with a 3'-phosphorothioate linkage
  modified_base 21: mod_base = OTHER; note = 2'-O-methyladenosine
agactgcaaagcctaatgata

SEQ ID NO: 524 - RNA, 21 nt, synthetic construct
  source 1..21: mol_type = other RNA
  modified_base 1: mod_base = OTHER; note = 2'-O-methylguanosine with a 3'-phosphorothioate linkage
  modified_base 2: mod_base = OTHER; note = 2'-O-methylguanosine with a 3'-phosphorothioate linkage
  modified_base 3: mod_base = OTHER; note = 2'-O-methyladenosine
  modified_base 4: mod_base = OTHER; note = 2'-O-methyladenosine
  modified_base 5: mod_base = gm
  modified_base 6: mod_base = OTHER; note = 2'-O-methyladenosine
  modified_base 7: mod_base = um
  modified_base 8: mod_base = gm
  modified_base 9: mod_base = OTHER; note = 2'-fluorouridine
  modified_base 10: mod_base = OTHER; note = 2'-fluoroguanosine
  modified_base 11: mod_base = OTHER; note = 2'-fluoroguanosine
  modified_base 12: mod_base = cm
  modified_base 13: mod_base = um
  modified_base 14: mod_base = gm
  modified_base 15: mod_base = um
  modified_base 16: mod_base = gm
  modified_base 17: mod_base = OTHER; note = 2'-O-methyladenosine
  modified_base 18: mod_base = OTHER; note = 2'-O-methyladenosine
  modified_base 19: mod_base = OTHER; note = 2'-O-methyladenosine with a 3'-phosphorothioate linkage
  modified_base 20: mod_base = OTHER; note = 2'-O-methyladenosine with a 3'-phosphorothioate linkage
  modified_base 21: mod_base = OTHER; note = 2'-O-methyladenosine
ggaagatgtggctgtgaaaaa

SEQ ID NO: 525 - RNA, 21 nt, synthetic construct
  source 1..21: mol_type = other RNA
  modified_base 1: mod_base = OTHER; note = 2'-O-methyluridine with a 3'-phosphorothioate linkage
  modified_base 2: mod_base = OTHER; note = 2'-O-methyladenosine with a 3'-phosphorothioate linkage
  modified_base 3: mod_base = gm
  modified_base 4: mod_base = OTHER; note = 2'-O-methyladenosine
  modified_base 5: mod_base = gm
  modified_base 6: mod_base = gm
  modified_base 7: mod_base = OTHER; note = 2'-O-methyladenosine
  modified_base 8: mod_base = OTHER; note = 2'-O-methyladenosine
  modified_base 9: mod_base = OTHER; note = 2'-fluoroadenosine
  modified_base 10: mod_base = OTHER; note = 2'-fluorouridine
  modified_base 11: mod_base = OTHER; note = 2'-fluoroguanosine
  modified_base 12: mod_base = OTHER; note = 2'-O-methyladenosine
  modified_base 13: mod_base = gm
  modified_base 14: mod_base = OTHER; note = 2'-O-methyladenosine
  modified_base 15: mod_base = OTHER; note = 2'-O-methyladenosine
  modified_base 16: mod_base = OTHER; note = 2'-O-methyladenosine
  modified_base 17: mod_base = gm
  modified_base 18: mod_base = gm
  modified_base 19: mod_base = OTHER; note = 2'-O-methyluridine with a 3'-phosphorothioate linkage
  modified_base 20: mod_base = OTHER; note = 2'-O-methyluridine with a 3'-phosphorothioate linkage
  modified_base 21: mod_base = OTHER; note = 2'-O-methyladenosine
tagaggaaatgagaaaggtta

SEQ ID NO: 526 - RNA, 21 nt, synthetic construct
  source 1..21: mol_type = other RNA
  modified_base 1: mod_base = OTHER; note = 2'-O-methylguanosine with a 3'-phosphorothioate linkage
  modified_base 2: mod_base = OTHER; note = 2'-O-methylguanosine with a 3'-phosphorothioate linkage
  modified_base 3: mod_base = um
  modified_base 4: mod_base = gm
  modified_base 5: mod_base = OTHER; note = 2'-O-methyladenosine
  modified_base 6: mod_base = um
  modified_base 7: mod_base = gm
  modified_base 8: mod_base = cm
  modified_base 9: mod_base = OTHER; note = 2'-fluoroadenosine
  modified_base 10: mod_base = OTHER; note = 2'-fluoroadenosine
  modified_base 11: mod_base = OTHER; note = 2'-fluorouridine
  modified_base 12: mod_base = cm
  modified_base 13: mod_base = um
  modified_base 14: mod_base = OTHER; note = 2'-O-methyladenosine
  modified_base 15: mod_base = um
  modified_base 16: mod_base = gm
  modified_base 17: mod_base = um
  modified_base 18: mod_base = um
  modified_base 19: mod_base = OTHER; note = 2'-O-methyluridine with a 3'-phosphorothioate linkage
  modified_base 20: mod_base = OTHER; note = 2'-O-methylcytidine with a 3'-phosphorothioate linkage
  modified_base 21: mod_base = OTHER; note = 2'-O-methyladenosine
ggtgatgcaatctatgtttca

SEQ ID NO: 527 - RNA, 21 nt, synthetic construct
  source 1..21: mol_type = other RNA
  modified_base 1: mod_base = OTHER; note = 2'-O-methyluridine with a 3'-phosphorothioate linkage
  modified_base 2: mod_base = OTHER; note = 2'-O-methyluridine with a 3'-phosphorothioate linkage
  modified_base 3: mod_base = cm
  modified_base 4: mod_base = um
  modified_base 5: mod_base = OTHER; note = 2'-O-methyladenosine
  modified_base 6: mod_base = cm
  modified_base 7: mod_base = cm
  modified_base 8: mod_base = um
  modified_base 9: mod_base = OTHER; note = 2'-fluorocytidine
  modified_base 10: mod_base = OTHER; note = 2'-fluoroadenosine
  modified_base 11: mod_base = OTHER; note = 2'-fluoroadenosine
  modified_base 12: mod_base = OTHER; note = 2'-O-methyladenosine
  modified_base 13: mod_base = gm
  modified_base 14: mod_base = OTHER; note = 2'-O-methyladenosine
  modified_base 15: mod_base = um
  modified_base 16: mod_base = OTHER; note = 2'-O-methyladenosine
  modified_base 17: mod_base = OTHER; note = 2'-O-methyladenosine
  modified_base 18: mod_base = gm
  modified_base 19: mod_base = OTHER; note = 2'-O-methyladenosine with a 3'-phosphorothioate linkage
  modified_base 20: mod_base = OTHER; note = 2'-O-methylcytidine with a 3'-phosphorothioate linkage
  modified_base 21: mod_base = OTHER; note = 2'-O-methyladenosine
ttctacctcaaagataagaca

SEQ ID NO: 528 - RNA, 21 nt, synthetic construct
  source 1..21: mol_type = other RNA
  modified_base 1: mod_base = OTHER; note = 2'-O-methyluridine with a 3'-phosphorothioate linkage
  modified_base 2: mod_base = OTHER; note = 2'-O-methyladenosine with a 3'-phosphorothioate linkage
  modified_base 3: mod_base = OTHER; note = 2'-O-methyladenosine
  modified_base 4: mod_base = cm
  modified_base 5: mod_base = um
  modified_base 6: mod_base = gm
  modified_base 7: mod_base = cm
  modified_base 8: mod_base = um
  modified_base 9: mod_base = OTHER; note = 2'-fluorocytidine
  modified_base 10: mod_base = OTHER; note = 2'-fluorouridine
  modified_base 11: mod_base = OTHER; note = 2'-fluorouridine
  modified_base 12: mod_base = cm
  modified_base 13: mod_base = gm
  modified_base 14: mod_base = um
  modified_base 15: mod_base = OTHER; note = 2'-O-methyladenosine
  modified_base 16: mod_base = um
  modified_base 17: mod_base = um
  modified_base 18: mod_base = OTHER; note = 2'-O-methyladenosine
  modified_base 19: mod_base = OTHER; note = 2'-O-methyladenosine with a 3'-phosphorothioate linkage
  modified_base 20: mod_base = OTHER; note = 2'-O-methylguanosine with a 3'-phosphorothioate linkage
  modified_base 21: mod_base = OTHER; note = 2'-O-methyladenosine
taactgctcttcgtattaaga

SEQ ID NO: 529 - RNA, 21 nt, synthetic construct
  source 1..21: mol_type = other RNA
  modified_base 1: mod_base = OTHER; note = 2'-O-methyladenosine with a 3'-phosphorothioate linkage
  modified_base 2: mod_base = OTHER; note = 2'-O-methylguanosine with a 3'-phosphorothioate linkage
  modified_base 3: mod_base = gm
  modified_base 4: mod_base = um
  modified_base 5: mod_base = OTHER; note = 2'-O-methyladenosine
  modified_base 6: mod_base = OTHER; note = 2'-O-methyladenosine
  modified_base 7: mod_base = OTHER; note = 2'-O-methyladenosine
  modified_base 8: mod_base = cm
  modified_base 9: mod_base = OTHER; note = 2'-fluorocytidine
  modified_base 10: mod_base = OTHER; note = 2'-fluorouridine
  modified_base 11: mod_base = OTHER; note = 2'-fluoroguanosine
  modified_base 12: mod_base = cm
  modified_base 13: mod_base = um
  modified_base 14: mod_base = OTHER; note = 2'-O-methyladenosine
  modified_base 15: mod_base = um
  modified_base 16: mod_base = um
  modified_base 17: mod_base = gm
  modified_base 18: mod_base = cm
  modified_base 19: mod_base = OTHER; note = 2'-O-methyluridine with a 3'-phosphorothioate linkage
  modified_base 20: mod_base = OTHER; note = 2'-O-methylcytidine with a 3'-phosphorothioate linkage
  modified_base 21: mod_base = OTHER; note = 2'-O-methyladenosine
aggtaaacctgctattgctca

SEQ ID NO: 530 - RNA, 21 nt, synthetic construct
  source 1..21: mol_type = other RNA
  modified_base 1: mod_base = OTHER; note = 2'-O-methyluridine with a 3'-phosphorothioate linkage
  modified_base 2: mod_base = OTHER; note = 2'-O-methyluridine with a 3'-phosphorothioate linkage
  modified_base 3: mod_base = um
  modified_base 4: mod_base = cm
  modified_base 5: mod_base = cm
  modified_base 6: mod_base = OTHER; note = 2'-O-methyladenosine
  modified_base 7: mod_base = um
  modified_base 8: mod_base = um
  modified_base 9: mod_base = OTHER; note = 2'-fluorouridine
  modified_base 10: mod_base = OTHER; note = 2'-fluorouridine
  modified_base 11: mod_base = OTHER; note = 2'-fluorocytidine
  modified_base 12: mod_base = cm
  modified_base 13: mod_base = cm
  modified_base 14: mod_base = cm
  modified_base 15: mod_base = um
  modified_base 16: mod_base = um
  modified_base 17: mod_base = um
  modified_base 18: mod_base = OTHER; note = 2'-O-methyladenosine
  modified_base 19: mod_base = OTHER; note = 2'-O-methyluridine with a 3'-phosphorothioate linkage
  modified_base 20: mod_base = OTHER; note = 2'-O-methylguanosine with a 3'-phosphorothioate linkage
  modified_base 21: mod_base = OTHER; note = 2'-O-methyladenosine
tttccattttcccctttatga

SEQ ID NO: 531 - RNA, 21 nt, synthetic construct
  source 1..21: mol_type = other RNA
  modified_base 1: mod_base = OTHER; note = 2'-O-methylguanosine with a 3'-phosphorothioate linkage
  modified_base 2: mod_base = OTHER; note = 2'-O-methylcytidine with a 3'-phosphorothioate linkage
  modified_base 3: mod_base = um
  modified_base 4: mod_base = gm
  modified_base 5: mod_base = gm
  modified_base 6: mod_base = um
  modified_base 7: mod_base = OTHER; note = 2'-O-methyladenosine
  modified_base 8: mod_base = um
  modified_base 9: mod_base = OTHER; note = 2'-fluorocytidine
  modified_base 10: mod_base = OTHER; note = 2'-fluorouridine
  modified_base 11: mod_base = OTHER; note = 2'-fluoroguanosine
  modified_base 12: mod_base = OTHER; note = 2'-O-methyladenosine
  modified_base 13: mod_base = OTHER; note = 2'-O-methyladenosine
  modified_base 14: mod_base = um
  modified_base 15: mod_base = OTHER; note = 2'-O-methyladenosine
  modified_base 16: mod_base = um
  modified_base 17: mod_base = cm
  modified_base 18: mod_base = OTHER; note = 2'-O-methyladenosine
  modified_base 19: mod_base = OTHER; note = 2'-O-methyluridine with a 3'-phosphorothioate linkage
  modified_base 20: mod_base = OTHER; note = 2'-O-methylguanosine with a 3'-phosphorothioate linkage
  modified_base 21: mod_base = OTHER; note = 2'-O-methyladenosine
gctggtatctgaatatcatga

SEQ ID NO: 532 - RNA, 21 nt, synthetic construct
  source 1..21: mol_type = other RNA
  modified_base 1: mod_base = OTHER; note = 2'-O-methyladenosine with a 3'-phosphorothioate linkage
  modified_base 2: mod_base = OTHER; note = 2'-O-methyladenosine with a 3'-phosphorothioate linkage
  modified_base 3: mod_base = um
  modified_base 4: mod_base = OTHER; note = 2'-O-methyladenosine
  modified_base 5: mod_base = um
  modified_base 6: mod_base = OTHER; note = 2'-O-methyladenosine
  modified_base 7: mod_base = um
  modified_base 8: mod_base = um
  modified_base 9: mod_base = OTHER; note = 2'-fluoroadenosine
  modified_base 10: mod_base = OTHER; note = 2'-fluorocytidine
  modified_base 11: mod_base = OTHER; note = 2'-fluoroadenosine
  modified_base 12: mod_base = OTHER; note = 2'-O-methyladenosine
  modified_base 13: mod_base = OTHER; note = 2'-O-methyladenosine
  modified_base 14: mod_base = OTHER; note = 2'-O-methyladenosine
  modified_base 15: mod_base = gm
  modified_base 16: mod_base = um
  modified_base 17: mod_base = OTHER; note = 2'-O-methyladenosine
  modified_base 18: mod_base = um
  modified_base 19: mod_base = OTHER; note = 2'-O-methyladenosine with a 3'-phosphorothioate linkage
  modified_base 20: mod_base = OTHER; note = 2'-O-methyladenosine with a 3'-phosphorothioate linkage
  modified_base 21: mod_base = OTHER; note = 2'-O-methyladenosine
aatatattacaaaagtataaa

SEQ ID NO: 533 - RNA, 21 nt, synthetic construct
  source 1..21: mol_type = other RNA
  modified_base 1: mod_base = OTHER; note = 2'-O-methyladenosine with a 3'-phosphorothioate linkage
  modified_base 2: mod_base = OTHER; note = 2'-O-methyluridine with a 3'-phosphorothioate linkage
  modified_base 3: mod_base = um
  modified_base 4: mod_base = OTHER; note = 2'-O-methyladenosine
  modified_base 5: mod_base = um
  modified_base 6: mod_base = gm
  modified_base 7: mod_base = um
  modified_base 8: mod_base = um
  modified_base 9: mod_base = OTHER; note = 2'-fluoroadenosine
  modified_base 10: mod_base = OTHER; note = 2'-fluoroadenosine
  modified_base 11: mod_base = OTHER; note = 2'-fluoroadenosine
  modified_base 12: mod_base = OTHER; note = 2'-O-methyladenosine
  modified_base 13: mod_base = OTHER; note = 2'-O-methyladenosine
  modified_base 14: mod_base = gm
  modified_base 15: mod_base = OTHER; note = 2'-O-methyladenosine
  modified_base 16: mod_base = OTHER; note = 2'-O-methyladenosine
  modified_base 17: mod_base = OTHER; note = 2'-O-methyladenosine
  modified_base 18: mod_base = um
  modified_base 19: mod_base = OTHER; note = 2'-O-methylcytidine with a 3'-phosphorothioate linkage
  modified_base 20: mod_base = OTHER; note = 2'-O-methyluridine with a 3'-phosphorothioate linkage
  modified_base 21: mod_base = OTHER; note = 2'-O-methyladenosine
attatgttaaaaagaaatcta

SEQ ID NO: 534 - RNA, 21 nt, synthetic construct
  source 1..21: mol_type = other RNA
  modified_base 1: mod_base = OTHER; note = 2'-O-methyladenosine with a 3'-phosphorothioate linkage
  modified_base 2: mod_base = OTHER; note = 2'-O-methylcytidine with a 3'-phosphorothioate linkage
  modified_base 3: mod_base = um
  modified_base 4: mod_base = OTHER; note = 2'-O-methyladenosine
  modified_base 5: mod_base = um
  modified_base 6: mod_base = OTHER; note = 2'-O-methyladenosine
  modified_base 7: mod_base = um
  modified_base 8: mod_base = cm
  modified_base 9: mod_base = OTHER; note = 2'-fluorouridine
  modified_base 10: mod_base = OTHER; note = 2'-fluorocytidine
  modified_base 11: mod_base = OTHER; note = 2'-fluoroadenosine
  modified_base 12: mod_base = OTHER; note = 2'-O-methyladenosine
  modified_base 13: mod_base = cm
  modified_base 14: mod_base = um
  modified_base 15: mod_base = um
  modified_base 16: mod_base = um
  modified_base 17: mod_base = gm
  modified_base 18: mod_base = um
  modified_base 19: mod_base = OTHER; note = 2'-O-methylguanosine with a 3'-phosphorothioate linkage
  modified_base 20: mod_base = OTHER; note = 2'-O-methyluridine with a 3'-phosphorothioate linkage
  modified_base 21: mod_base = OTHER; note = 2'-O-methyladenosine
actatatctcaactttgtgta

SEQ ID NO: 535 - RNA, 21 nt, synthetic construct
  source 1..21: mol_type = other RNA
  modified_base 1: mod_base = OTHER; note = 2'-O-methylguanosine with a 3'-phosphorothioate linkage
  modified_base 2: mod_base = OTHER; note = 2'-O-methylguanosine with a 3'-phosphorothioate linkage
  modified_base 3: mod_base = OTHER; note = 2'-O-methyladenosine
  modified_base 4: mod_base = gm
  modified_base 5: mod_base = um
  modified_base 6: mod_base = um
  modified_base 7: mod_base = gm
  modified_base 8: mod_base = OTHER; note = 2'-O-methyladenosine
  modified_base 9: mod_base = OTHER; note = 2'-fluorocytidine
  modified_base 10: mod_base = OTHER; note = 2'-fluorouridine
  modified_base 11: mod_base = OTHER; note = 2'-fluorouridine
  modified_base 12: mod_base = cm
  modified_base 13: mod_base = OTHER; note = 2'-O-methyladenosine
  modified_base 14: mod_base = um
  modified_base 15: mod_base = cm
  modified_base 16: mod_base = cm
  modified_base 17: mod_base = OTHER; note = 2'-O-methyladenosine
  modified_base 18: mod_base = OTHER; note = 2'-O-methyladenosine
  modified_base 19: mod_base = OTHER; note = 2'-O-methyluridine with a 3'-phosphorothioate linkage
  modified_base 20: mod_base = OTHER; note = 2'-O-methylcytidine with a 3'-phosphorothioate linkage
  modified_base 21: mod_base = OTHER; note = 2'-O-methyladenosine
ggagttgacttcatccaatca

SEQ ID NO: 536 - RNA, 21 nt, synthetic construct
  source 1..21: mol_type = other RNA
  modified_base 1: mod_base = OTHER; note = 2'-O-methyladenosine with a 3'-phosphorothioate linkage
  modified_base 2: mod_base = OTHER; note = 2'-O-methyladenosine with a 3'-phosphorothioate linkage
  modified_base 3: mod_base = OTHER; note = 2'-O-methyladenosine
  modified_base 4: mod_base = OTHER; note = 2'-O-methyladenosine
  modified_base 5: mod_base = um
  modified_base 6: mod_base = OTHER; note = 2'-O-methyladenosine
  modified_base 7: mod_base = OTHER; note = 2'-O-methyladenosine
  modified_base 8: mod_base = OTHER; note = 2'-O-methyladenosine
  modified_base 9: mod_base = OTHER; note = 2'-fluorouridine
  modified_base 10: mod_base = OTHER; note = 2'-fluoroadenosine
  modified_base 11: mod_base = OTHER; note = 2'-fluorouridine
  modified_base 12: mod_base = um
  modified_base 13: mod_base = gm
  modified_base 14: mod_base = cm
  modified_base 15: mod_base = um
  modified_base 16: mod_base = cm
  modified_base 17: mod_base = um
  modified_base 18: mod_base = OTHER; note = 2'-O-methyladenosine
  modified_base 19: mod_base = OTHER; note = 2'-O-methyladenosine with a 3'-phosphorothioate linkage
  modified_base 20: mod_base = OTHER; note = 2'-O-methyladenosine with a 3'-phosphorothioate linkage
  modified_base 21: mod_base = OTHER; note = 2'-O-methyladenosine
aaaataaatattgctctaaaa

SEQ ID NO: 537 - RNA, 21 nt, synthetic construct
  source 1..21: mol_type = other RNA
  modified_base 1: mod_base = OTHER; note = 2'-O-methylcytidine with a 3'-phosphorothioate linkage
  modified_base 2: mod_base = OTHER; note = 2'-O-methyluridine with a 3'-phosphorothioate linkage
  modified_base 3: mod_base = gm
  modified_base 4: mod_base = um
  modified_base 5: mod_base = cm
  modified_base 6: mod_base = OTHER; note = 2'-O-methyladenosine
  modified_base 7: mod_base = um
  modified_base 8: mod_base = OTHER; note = 2'-O-methyladenosine
  modified_base 9: mod_base = OTHER; note = 2'-fluoroguanosine
  modified_base 10: mod_base = OTHER; note = 2'-fluorouridine
  modified_base 11: mod_base = OTHER; note = 2'-fluorouridine
  modified_base 12: mod_base = cm
  modified_base 13: mod_base = cm
  modified_base 14: mod_base = OTHER; note = 2'-O-methyladenosine
  modified_base 15: mod_base = OTHER; note = 2'-O-methyladenosine
  modified_base 16: mod_base = cm
  modified_base 17: mod_base = OTHER; note = 2'-O-methyladenosine
  modified_base 18: mod_base = OTHER; note = 2'-O-methyladenosine
  modified_base 19: mod_base = OTHER; note = 2'-O-methyluridine with a 3'-phosphorothioate linkage
  modified_base 20: mod_base = OTHER; note = 2'-O-methylguanosine with a 3'-phosphorothioate linkage
  modified_base 21: mod_base = OTHER; note = 2'-O-methyladenosine
ctgtcatagttccaacaatga

SEQ ID NO: 538 - RNA, 21 nt, synthetic construct
  source 1..21: mol_type = other RNA
  modified_base 1: mod_base = OTHER; note = 2'-O-methylguanosine with a 3'-phosphorothioate linkage
  modified_base 2: mod_base = OTHER; note = 2'-O-methylcytidine with a 3'-phosphorothioate linkage
  modified_base 3: mod_base = cm
  modified_base 4: mod_base = um
  modified_base 5: mod_base = OTHER; note = 2'-O-methyladenosine
  modified_base 6: mod_base = OTHER; note = 2'-O-methyladenosine
  modified_base 7: mod_base = um
  modified_base 8: mod_base = gm
  modified_base 9: mod_base = OTHER; note = 2'-fluoroadenosine
  modified_base 10: mod_base = OTHER; note = 2'-fluorouridine
  modified_base 11: mod_base = OTHER; note = 2'-fluoroguanosine
  modified_base 12: mod_base = OTHER; note = 2'-O-methyladenosine
  modified_base 13: mod_base = um
  modified_base 14: mod_base = OTHER; note = 2'-O-methyladenosine
  modified_base 15: mod_base = OTHER; note = 2'-O-methyladenosine
  modified_base 16: mod_base = um
  modified_base 17: mod_base = um
  modified_base 18: mod_base = OTHER; note = 2'-O-methyladenosine
  modified_base 19: mod_base = OTHER; note = 2'-O-methyluridine with a 3'-phosphorothioate linkage
  modified_base 20: mod_base = OTHER; note = 2'-O-methylguanosine with a 3'-phosphorothioate linkage
  modified_base 21: mod_base = OTHER; note = 2'-O-methyladenosine
gcctaatgatgataattatga

SEQ ID NO: 539 - RNA, 21 nt, synthetic construct
  source 1..21: mol_type = other RNA
  modified_base 1: mod_base = OTHER; note = 2'-O-methyladenosine with a 3'-phosphorothioate linkage
  modified_base 2: mod_base = OTHER; note = 2'-O-methyluridine with a 3'-phosphorothioate linkage
  modified_base 3: mod_base = OTHER; note = 2'-O-methyladenosine
  modified_base 4: mod_base = OTHER; note = 2'-O-methyladenosine
  modified_base 5: mod_base = cm
  modified_base 6: mod_base = um
  modified_base 7: mod_base = cm
  modified_base 8: mod_base = um
  modified_base 9: mod_base = OTHER; note = 2'-fluoroadenosine
  modified_base 10: mod_base = OTHER; note = 2'-fluoroadenosine
  modified_base 11: mod_base = OTHER; note = 2'-fluoroadenosine
  modified_base 12: mod_base = gm
  modified_base 13: mod_base = um
  modified_base 14: mod_base = um
  modified_base 15: mod_base = OTHER; note = 2'-O-methyladenosine
  modified_base 16: mod_base = OTHER; note = 2'-O-methyladenosine
  modified_base 17: mod_base = gm
  modified_base 18: mod_base = cm
  modified_base 19: mod_base = OTHER; note = 2'-O-methyladenosine with a 3'-phosphorothioate linkage
  modified_base 20: mod_base = OTHER; note = 2'-O-methyluridine with a 3'-phosphorothioate linkage
  modified_base 21: mod_base = OTHER; note = 2'-O-methyladenosine
ataactctaaagttaagcata

SEQ ID NO: 540 - RNA, 21 nt, synthetic construct
  source 1..21: mol_type = other RNA
  modified_base 1: mod_base = OTHER; note = 2'-O-methyluridine with a 3'-phosphorothioate linkage
  modified_base 2: mod_base = OTHER; note = 2'-O-methyladenosine with a 3'-phosphorothioate linkage
  modified_base 3: mod_base = OTHER; note = 2'-O-methyladenosine
  modified_base 4: mod_base = um
  modified_base 5: mod_base = um
  modified_base 6: mod_base = um
  modified_base 7: mod_base = um
  modified_base 8: mod_base = OTHER; note = 2'-O-methyladenosine
  modified_base 9: mod_base = OTHER; note = 2'-fluorouridine
  modified_base 10: mod_base = OTHER; note = 2'-fluorouridine
  modified_base 11: mod_base = OTHER; note = 2'-fluorouridine
  modified_base 12: mod_base = um
  modified_base 13: mod_base = gm
  modified_base 14: mod_base = OTHER; note = 2'-O-methyladenosine
  modified_base 15: mod_base = OTHER; note = 2'-O-methyladenosine
  modified_base 16: mod_base = OTHER; note = 2'-O-methyladenosine
  modified_base 17: mod_base = gm
  modified_base 18: mod_base = cm
  modified_base 19: mod_base = OTHER; note = 2'-O-methyladenosine with a 3'-phosphorothioate linkage
  modified_base 20: mod_base = OTHER; note = 2'-O-methyladenosine with a 3'-phosphorothioate linkage
  modified_base 21: mod_base = OTHER; note = 2'-O-methyladenosine
taattttattttgaaagcaaa

SEQ ID NO: 541 - RNA, 21 nt, synthetic construct
  source 1..21: mol_type = other RNA
  modified_base 1: mod_base = OTHER; note = 2'-O-methyladenosine with a 3'-phosphorothioate linkage
  modified_base 2: mod_base = OTHER; note = 2'-O-methyladenosine with a 3'-phosphorothioate linkage
  modified_base 3: mod_base = gm
  modified_base 4: mod_base = OTHER; note = 2'-O-methyladenosine
  modified_base 5: mod_base = um
  modified_base 6: mod_base = OTHER; note = 2'-O-methyladenosine
  modified_base 7: mod_base = OTHER; note = 2'-O-methyladenosine
  modified_base 8: mod_base = gm
  modified_base 9: mod_base = OTHER; note = 2'-fluoroadenosine
  modified_base 10: mod_base = OTHER; note = 2'-fluorocytidine
  modified_base 11: mod_base = OTHER; note = 2'-fluoroadenosine
  modified_base 12: mod_base = gm
  modified_base 13: mod_base = um
  modified_base 14: mod_base = OTHER; note = 2'-O-methyladenosine
  modified_base 15: mod_base = cm
  modified_base 16: mod_base = OTHER; note = 2'-O-methyladenosine
  modified_base 17: mod_base = gm
  modified_base 18: mod_base = um
  modified_base 19: mod_base = OTHER; note = 2'-O-methyladenosine with a 3'-phosphorothioate linkage
  modified_base 20: mod_base = OTHER; note = 2'-O-methyluridine with a 3'-phosphorothioate linkage
  modified_base 21: mod_base = OTHER; note = 2'-O-methyladenosine
aagataagacagtacagtata

SEQ ID NO: 542 - RNA, 21 nt, synthetic construct
  source 1..21: mol_type = other RNA
  modified_base 1: mod_base = OTHER; note = 2'-O-methyladenosine with a 3'-phosphorothioate linkage
  modified_base 2: mod_base = OTHER; note = 2'-O-methyluridine with a 3'-phosphorothioate linkage
  modified_base 3: mod_base = gm
  modified_base 4: mod_base = OTHER; note = 2'-O-methyladenosine
  modified_base 5: mod_base = um
  modified_base 6: mod_base = OTHER; note = 2'-O-methyladenosine
  modified_base 7: mod_base = OTHER; note = 2'-O-methyladenosine
  modified_base 8: mod_base = um
  modified_base 9: mod_base = OTHER; note = 2'-fluorouridine
  modified_base 10: mod_base = OTHER; note = 2'-fluoroadenosine
  modified_base 11: mod_base = OTHER; note = 2'-fluorouridine
  modified_base 12: mod_base = gm
  modified_base 13: mod_base = um
  modified_base 14: mod_base = um
  modified_base 15: mod_base = OTHER; note = 2'-O-methyladenosine
  modified_base 16: mod_base = OTHER; note = 2'-O-methyladenosine
  modified_base 17: mod_base = OTHER; note = 2'-O-methyladenosine
  modified_base 18: mod_base = OTHER; note = 2'-O-methyladenosine
  modified_base 19: mod_base = OTHER; note = 2'-O-methyladenosine with a 3'-phosphorothioate linkage
  modified_base 20: mod_base = OTHER; note = 2'-O-methylguanosine with a 3'-phosphorothioate linkage
  modified_base 21: mod_base = OTHER; note = 2'-O-methyladenosine
atgataattatgttaaaaaga

SEQ ID NO: 543 - RNA, 21 nt, synthetic construct
  source 1..21: mol_type = other RNA
  modified_base 1: mod_base = OTHER; note = 2'-O-methyluridine with a 3'-phosphorothioate linkage
  modified_base 2: mod_base = OTHER; note = 2'-O-methylcytidine with a 3'-phosphorothioate linkage
  modified_base 3: mod_base = um
  modified_base 4: mod_base = cm
  modified_base 5: mod_base = OTHER; note = 2'-O-methyladenosine
  modified_base 6: mod_base = OTHER; note = 2'-O-methyladenosine
  modified_base 7: mod_base = cm
  modified_base 8: mod_base = um
  modified_base 9: mod_base = OTHER; note = 2'-fluorouridine
  modified_base 10: mod_base = OTHER; note = 2'-fluorouridine
  modified_base 11: mod_base = OTHER; note = 2'-fluoroguanosine
  modified_base 12: mod_base = um
  modified_base 13: mod_base = gm
  modified_base 14: mod_base = um
  modified_base 15: mod_base = cm
  modified_base 16: mod_base = OTHER; note = 2'-O-methyladenosine
  modified_base 17: mod_base = OTHER; note = 2'-O-methyladenosine
  modified_base 18: mod_base = OTHER; note = 2'-O-methyladenosine
  modified_base 19: mod_base = OTHER; note = 2'-O-methylguanosine with a 3'-phosphorothioate linkage
  modified_base 20: mod_base = OTHER; note = 2'-O-methyladenosine with a 3'-phosphorothioate linkage
  modified_base 21: mod_base = OTHER; note = 2'-O-methyladenosine
tctcaactttgtgtcaaagaa

SEQ ID NO: 544 - RNA, 21 nt, synthetic construct
  source 1..21: mol_type = other RNA
  modified_base 1: mod_base = OTHER; note = 2'-O-methyluridine with a 3'-phosphorothioate linkage
  modified_base 2: mod_base = OTHER; note = 2'-O-methyluridine with a 3'-phosphorothioate linkage
  modified_base 3: mod_base = um
  modified_base 4: mod_base = um
  modified_base 5: mod_base = um
  modified_base 6: mod_base = um
  modified_base 7: mod_base = gm
  modified_base 8: mod_base = um
  modified_base 9: mod_base = OTHER; note = 2'-fluorouridine
  modified_base 10: mod_base = OTHER; note = 2'-fluorocytidine
  modified_base 11: mod_base = OTHER; note = 2'-fluorouridine
  modified_base 12: mod_base = OTHER; note = 2'-O-methyladenosine
  modified_base 13: mod_base = cm
  modified_base 14: mod_base = cm
  modified_base 15: mod_base = um
  modified_base 16: mod_base = cm
  modified_base 17: mod_base = OTHER; note = 2'-O-methyladenosine
  modified_base 18: mod_base = OTHER; note = 2'-O-methyladenosine
  modified_base 19: mod_base = OTHER; note = 2'-O-methyladenosine with a 3'-phosphorothioate linkage
  modified_base 20: mod_base = OTHER; note = 2'-O-methylguanosine with a 3'-phosphorothioate linkage
  modified_base 21: mod_base = OTHER; note = 2'-O-methyladenosine
ttttttgttctacctcaaaga

SEQ ID NO: 545 - RNA, 21 nt, synthetic construct
  source 1..21: mol_type = other RNA
  modified_base 1: mod_base = OTHER; note = 2'-O-methyladenosine with a 3'-phosphorothioate linkage
  modified_base 2: mod_base = OTHER; note = 2'-O-methyluridine with a 3'-phosphorothioate linkage
  modified_base 3: mod_base = um
  modified_base 4: mod_base = OTHER; note = 2'-O-methyladenosine
  modified_base 5: mod_base = cm
  modified_base 6: mod_base = OTHER; note = 2'-O-methyladenosine
  modified_base 7: mod_base = OTHER; note = 2'-O-methyladenosine
  modified_base 8: mod_base = OTHER; note = 2'-O-methyladenosine
  modified_base 9: mod_base = OTHER; note = 2'-fluoroadenosine
  modified_base 10: mod_base = OTHER; note = 2'-fluoroguanosine
  modified_base 11: mod_base = OTHER; note = 2'-fluorouridine
  modified_base 12: mod_base = OTHER; note = 2'-O-methyladenosine
  modified_base 13: mod_base = um
  modified_base 14: mod_base = OTHER; note = 2'-O-methyladenosine
  modified_base 15: mod_base = OTHER; note = 2'-O-methyladenosine
  modified_base 16: mod_base = OTHER; note = 2'-O-methyladenosine
  modified_base 17: mod_base = OTHER; note = 2'-O-methyladenosine
  modified_base 18: mod_base = um
  modified_base 19: mod_base = OTHER; note = 2'-O-methyladenosine with a 3'-phosphorothioate linkage
  modified_base 20: mod_base = OTHER; note = 2'-O-methyladenosine with a 3'-phosphorothioate linkage
  modified_base 21: mod_base = OTHER; note = 2'-O-methyladenosine
attacaaaagtataaaataaa

SEQ ID NO: 546 - RNA, 21 nt, synthetic construct
  source 1..21: mol_type = other RNA
  modified_base 1: mod_base = OTHER; note = 2'-O-methyladenosine with a 3'-phosphorothioate linkage
  modified_base 2: mod_base = OTHER; note = 2'-O-methyladenosine with a 3'-phosphorothioate linkage
  modified_base 3: mod_base = OTHER; note = 2'-O-methyladenosine
  modified_base 4: mod_base = gm
  modified_base 5: mod_base = cm
  modified_base 6: mod_base = cm
  modified_base 7: mod_base = um
  modified_base 8: mod_base = OTHER; note = 2'-O-methyladenosine
  modified_base 9: mod_base = OTHER; note = 2'-fluoroadenosine
  modified_base 10: mod_base = OTHER; note = 2'-fluorouridine
  modified_base 11: mod_base = OTHER; note = 2'-fluoroguanosine
  modified_base 12: mod_base = OTHER; note = 2'-O-methyladenosine
  modified_base 13: mod_base = um
  modified_base 14: mod_base = gm
  modified_base 15: mod_base = OTHER; note = 2'-O-methyladenosine
  modified_base 16: mod_base = um
  modified_base 17: mod_base = OTHER; note = 2'-O-methyladenosine
  modified_base 18: mod_base = OTHER; note = 2'-O-methyladenosine
  modified_base 19: mod_base = OTHER; note = 2'-O-methyluridine with a 3'-phosphorothioate linkage
  modified_base 20: mod_base = OTHER; note = 2'-O-methyluridine with a 3'-phosphorothioate linkage
  modified_base 21: mod_base = OTHER; note = 2'-O-methyladenosine
aaagcctaatgatgataatta

SEQ ID NO: 547 - RNA, 21 nt, synthetic construct
  source 1..21: mol_type = other RNA
  modified_base 1: mod_base = OTHER; note = 2'-O-methylcytidine with a 3'-phosphorothioate linkage
  modified_base 2: mod_base = OTHER; note = 2'-O-methyluridine with a 3'-phosphorothioate linkage
  modified_base 3: mod_base = cm
  modified_base 4: mod_base = OTHER; note = 2'-O-methyladenosine
  modified_base 5: mod_base = um
  modified_base 6: mod_base = OTHER; note = 2'-O-methyladenosine
  modified_base 7: mod_base = gm
  modified_base 8: mod_base = cm
  modified_base 9: mod_base = OTHER; note = 2'-fluorouridine
  modified_base 10: mod_base = OTHER; note = 2'-fluorouridine
  modified_base 11: mod_base = OTHER; note = 2'-fluorouridine
  modified_base 12: mod_base = cm
  modified_base 13: mod_base = um
  modified_base 14: mod_base = um
  modified_base 15: mod_base = um
  modified_base 16: mod_base = um
  modified_base 17: mod_base = cm
  modified_base 18: mod_base = cm
  modified_base 19: mod_base = OTHER; note = 2'-O-methyladenosine with a 3'-phosphorothioate linkage
  modified_base 20: mod_base = OTHER; note = 2'-O-methyluridine with a 3'-phosphorothioate linkage
  modified_base 21: mod_base = OTHER; note = 2'-O-methyladenosine
ctcatagctttcttttccata

SEQ ID NO: 548 - RNA, 21 nt, synthetic construct
  source 1..21: mol_type = other RNA
  modified_base 1: mod_base = OTHER; note = 2'-O-methylguanosine with a 3'-phosphorothioate linkage
  modified_base 2: mod_base = OTHER; note = 2'-O-methylcytidine with a 3'-phosphorothioate linkage
  modified_base 3: mod_base = OTHER; note = 2'-O-methyladenosine
  modified_base 4: mod_base = um
  modified_base 5: mod_base = OTHER; note = 2'-O-methyladenosine
  modified_base 6: mod_base = um
  modified_base 7: mod_base = OTHER; note = 2'-O-methyladenosine
  modified_base 8: mod_base = OTHER; note = 2'-O-methyladenosine
  modified_base 9: mod_base = OTHER; note = 2'-fluorouridine
  modified_base 10: mod_base = OTHER; note = 2'-fluoroguanosine
  modified_base 11: mod_base = OTHER; note = 2'-fluorouridine
  modified_base 12: mod_base = OTHER; note = 2'-O-methyladenosine
  modified_base 13: mod_base = um
  modified_base 14: mod_base = um
  modified_base 15: mod_base = um
  modified_base 16: mod_base = um
  modified_base 17: mod_base = gm
  modified_base 18: mod_base = OTHER; note = 2'-O-methyladenosine
  modified_base 19: mod_base = OTHER; note = 2'-O-methyladenosine with a 3'-phosphorothioate linkage
  modified_base 20: mod_base = OTHER; note = 2'-O-methylguanosine with a 3'-phosphorothioate linkage
  modified_base 21: mod_base = OTHER; note = 2'-O-methyladenosine
gcatataatgtattttgaaga

SEQ ID NO: 549 - RNA, 21 nt, synthetic construct
  source 1..21: mol_type = other RNA
  modified_base 1: mod_base = OTHER; note = 2'-O-methylcytidine with a 3'-phosphorothioate linkage
  modified_base 2: mod_base = OTHER; note = 2'-O-methyluridine with a 3'-phosphorothioate linkage
  modified_base 3: mod_base = gm
  modified_base 4: mod_base = cm
  modified_base 5: mod_base = um
  modified_base 6: mod_base = cm
  modified_base 7: mod_base = um
  modified_base 8: mod_base = um
  modified_base 9: mod_base = OTHER; note = 2'-fluorocytidine
  modified_base 10: mod_base = OTHER; note = 2'-fluoroguanosine
  modified_base 11: mod_base = OTHER; note = 2'-fluorouridine
  modified_base 12: mod_base = OTHER; note = 2'-O-methyladenosine
  modified_base 13: mod_base = um
  modified_base 14: mod_base = um
  modified_base 15: mod_base = OTHER; note = 2'-O-methyladenosine
  modified_base 16: mod_base = OTHER; note = 2'-O-methyladenosine
  modified_base 17: mod_base = gm
  modified_base 18: mod_base = OTHER; note = 2'-O-methyladenosine
  modified_base 19: mod_base = OTHER; note = 2'-O-methyladenosine with a 3'-phosphorothioate linkage
  modified_base 20: mod_base = OTHER; note = 2'-O-methylguanosine with a 3'-phosphorothioate linkage
  modified_base 21: mod_base = OTHER; note = 2'-O-methyladenosine
ctgctcttcgtattaagaaga

SEQ ID NO: 550 - RNA, 21 nt, synthetic construct
  source 1..21: mol_type = other RNA
  modified_base 1: mod_base = OTHER; note = 2'-O-methylguanosine with a 3'-phosphorothioate linkage
  modified_base 2: mod_base = OTHER; note = 2'-O-methyluridine with a 3'-phosphorothioate linkage
  modified_base 3: mod_base = um
  modified_base 4: mod_base = um
  modified_base 5: mod_base = um
  modified_base 6: mod_base = um
  modified_base 7: mod_base = OTHER; note = 2'-O-methyladenosine
  modified_base 8: mod_base = um
  modified_base 9: mod_base = OTHER; note = 2'-fluorouridine
  modified_base 10: mod_base = OTHER; note = 2'-fluorouridine
  modified_base 11: mod_base = OTHER; note = 2'-fluorouridine
  modified_base 12: mod_base = OTHER; note = 2'-O-methyladenosine
  modified_base 13: mod_base = cm
  modified_base 14: mod_base = um
  modified_base 15: mod_base = um
  modified_base 16: mod_base = gm
  modified_base 17: mod_base = OTHER; note = 2'-O-methyladenosine
  modified_base 18: mod_base = OTHER; note = 2'-O-methyladenosine
  modified_base 19: mod_base = OTHER; note = 2'-O-methylcytidine with a 3'-phosphorothioate linkage
  modified_base 20: mod_base = OTHER; note = 2'-O-methylcytidine with a 3'-phosphorothioate linkage
  modified_base 21: mod_base = OTHER; note = 2'-O-methyladenosine
gtttttattttacttgaacca

SEQ ID NO: 551 - RNA, 21 nt, synthetic construct
  source 1..21: mol_type = other RNA
  modified_base 1: mod_base = OTHER; note = 2'-O-methylcytidine with a 3'-phosphorothioate linkage
  modified_base 2: mod_base = OTHER; note = 2'-O-methylcytidine with a 3'-phosphorothioate linkage
  modified_base 3: mod_base = OTHER; note = 2'-O-methyladenosine
  modified_base 4: mod_base = um
  modified_base 5: mod_base = um
  modified_base 6: mod_base = um
  modified_base 7: mod_base = um
  modified_base 8: mod_base = cm
  modified_base 9: mod_base = OTHER; note = 2'-fluorocytidine
  modified_base 10: mod_base = OTHER; note = 2'-fluorocytidine
  modified_base 11: mod_base = OTHER; note = 2'-fluorocytidine
  modified_base 12: mod_base = um
  modified_base 13: mod_base = um
  modified_base 14: mod_base = um
  modified_base 15: mod_base = OTHER; note = 2'-O-methyladenosine
  modified_base 16: mod_base = um
  modified_base 17: mod_base = gm
  modified_base 18: mod_base = um
  modified_base 19: mod_base = OTHER; note = 2'-O-methylguanosine with a 3'-phosphorothioate linkage
  modified_base 20: mod_base = OTHER; note = 2'-O-methyladenosine with a 3'-phosphorothioate linkage
  modified_base 21: mod_base = OTHER; note = 2'-O-methyladenosine
ccattttcccctttatgtgaa

SEQ ID NO: 552 - RNA, 21 nt, synthetic construct
  source 1..21: mol_type = other RNA
  modified_base 1: mod_base = OTHER; note = 2'-O-methyladenosine with a 3'-phosphorothioate linkage
  modified_base 2: mod_base = OTHER; note = 2'-O-methyluridine with a 3'-phosphorothioate linkage
  modified_base 3: mod_base = OTHER; note = 2'-O-methyladenosine
  modified_base 4: mod_base = um
  modified_base 5: mod_base = um
  modified_base 6: mod_base = OTHER; note = 2'-O-methyladenosine
  modified_base 7: mod_base = cm
  modified_base 8: mod_base = OTHER; note = 2'-O-methyladenosine
  modified_base 9: mod_base = OTHER; note = 2'-fluoroadenosine
  modified_base 10: mod_base = OTHER; note = 2'-fluoroadenosine
  modified_base 11: mod_base = OTHER; note = 2'-fluoroadenosine
  modified_base 12: mod_base = gm
  modified_base 13: mod_base = um
  modified_base 14: mod_base = OTHER; note = 2'-O-methyladenosine
  modified_base 15: mod_base = um
  modified_base 16: mod_base = OTHER; note = 2'-O-methyladenosine
  modified_base 17: mod_base = OTHER; note = 2'-O-methyladenosine
  modified_base 18: mod_base = OTHER; note = 2'-O-methyladenosine
  modified_base 19: mod_base = OTHER; note = 2'-O-methyladenosine with a 3'-phosphorothioate linkage
  modified_base 20: mod_base = OTHER; note = 2'-O-methyluridine with a 3'-phosphorothioate linkage
  modified_base 21: mod_base = OTHER; note = 2'-O-methyladenosine
atattacaaaagtataaaata

SEQ ID NO: 553 - RNA, 21 nt, synthetic construct
  source 1..21: mol_type = other RNA
  modified_base 1: mod_base = OTHER; note = 2'-O-methylguanosine with a 3'-phosphorothioate linkage
  modified_base 2: mod_base = OTHER; note = 2'-O-methylcytidine with a 3'-phosphorothioate linkage
  modified_base 3: mod_base = um
  modified_base 4: mod_base = cm
  modified_base 5: mod_base = cm
  modified_base 6: mod_base = um
  modified_base 7: mod_base = gm
  modified_base 8: mod_base = OTHER; note = 2'-O-methyladenosine
  modified_base 9: mod_base = OTHER; note = 2'-fluoroadenosine
  modified_base 10: mod_base = OTHER; note = 2'-fluoroadenosine
  modified_base 11: mod_base = OTHER; note = 2'-fluorouridine
  modified_base 12: mod_base = gm
  modified_base 13: mod_base = cm
  modified_base 14: mod_base = um
  modified_base 15: mod_base = um
  modified_base 16: mod_base = gm
  modified_base 17: mod_base = OTHER; note = 2'-O-methyladenosine
  modified_base 18: mod_base = um
  modified_base 19: mod_base = OTHER; note = 2'-O-methylguanosine with a 3'-phosphorothioate linkage
  modified_base 20: mod_base = OTHER; note = 2'-O-methyladenosine with a 3'-phosphorothioate linkage
  modified_base 21: mod_base = OTHER; note = 2'-O-methyladenosine
gctcctgaaatgcttgatgaa

SEQ ID NO: 554 - RNA, 21 nt, synthetic construct
  source 1..21: mol_type = other RNA
  modified_base 1: mod_base = OTHER; note = 2'-O-methyladenosine with a 3'-phosphorothioate linkage
  modified_base 2: mod_base = OTHER; note = 2'-O-methyluridine with a 3'-phosphorothioate linkage
  modified_base 3: mod_base = OTHER; note = 2'-O-methyladenosine
  modified_base 4: mod_base = OTHER; note = 2'-O-methyladenosine
  modified_base 5: mod_base = um
  modified_base 6: mod_base = um
  modified_base 7: mod_base = OTHER; note = 2'-O-methyladenosine
  modified_base 8: mod_base = um
  modified_base 9: mod_base = OTHER; note = 2'-fluoroguanosine
  modified_base 10: mod_base = OTHER; note = 2'-fluorouridine
  modified_base 11: mod_base = OTHER; note = 2'-fluorouridine
  modified_base 12: mod_base = OTHER; note = 2'-O-methyladenosine
  modified_base 13: mod_base = OTHER; note = 2'-O-methyladenosine
  modified_base 14: mod_base = OTHER; note = 2'-O-methyladenosine
  modified_base 15: mod_base = OTHER; note = 2'-O-methyladenosine
  modified_base 16: mod_base = OTHER; note = 2'-O-methyladenosine
  modified_base 17: mod_base = gm
  modified_base 18: mod_base = OTHER; note = 2'-O-methyladenosine
  modified_base 19: mod_base = OTHER; note = 2'-O-methyladenosine with a 3'-phosphorothioate linkage
  modified_base 20: mod_base = OTHER; note = 2'-O-methyladenosine with a 3'-phosphorothioate linkage
  modified_base 21: mod_base = OTHER; note = 2'-O-methyladenosine
ataattatgttaaaaagaaaa

SEQ ID NO: 555 - RNA, 21 nt, synthetic construct
  source 1..21: mol_type = other RNA
  modified_base 1: mod_base = OTHER; note = 2'-O-methyluridine with a 3'-phosphorothioate linkage
  modified_base 2: mod_base = OTHER; note = 2'-O-methylguanosine with a 3'-phosphorothioate linkage
  modified_base 3: mod_base = OTHER; note = 2'-O-methyladenosine
  modified_base 4: mod_base = um
  modified_base 5: mod_base = gm
  modified_base 6: mod_base = OTHER; note = 2'-O-methyladenosine
  modified_base 7: mod_base = um
  modified_base 8: mod_base = OTHER; note = 2'-O-methyladenosine
  modified_base 9: mod_base = OTHER; note = 2'-fluoroadenosine
  modified_base 10: mod_base = OTHER; note = 2'-fluorouridine
  modified_base 11: mod_base = OTHER; note = 2'-fluorouridine
  modified_base 12: mod_base = OTHER; note = 2'-O-methyladenosine
  modified_base 13: mod_base = um
  modified_base 14: mod_base = gm
  modified_base 15: mod_base = um
  modified_base 16: mod_base = um
  modified_base 17: mod_base = OTHER; note = 2'-O-methyladenosine
  modified_base 18: mod_base = OTHER; note = 2'-O-methyladenosine
  modified_base 19: mod_base = OTHER; note = 2'-O-methyladenosine with a 3'-phosphorothioate linkage
  modified_base 20: mod_base = OTHER; note = 2'-O-methyladenosine with a 3'-phosphorothioate linkage
  modified_base 21: mod_base = OTHER; note = 2'-O-methyladenosine
tgatgataattatgttaaaaa

SEQ ID NO: 556 - RNA, 21 nt, synthetic construct
  source 1..21: mol_type = other RNA
  modified_base 1: mod_base = OTHER; note = 2'-O-methyladenosine with a 3'-phosphorothioate linkage
  modified_base 2: mod_base = OTHER; note = 2'-O-methylcytidine with a 3'-phosphorothioate linkage
  modified_base 3: mod_base = um
  modified_base 4: mod_base = gm
  modified_base 5: mod_base = cm
  modified_base 6: mod_base = OTHER; note = 2'-O-methyladenosine
  modified_base 7: mod_base = OTHER; note = 2'-O-methyladenosine
  modified_base 8: mod_base = OTHER; note = 2'-O-methyladenosine
  modified_base 9: mod_base = OTHER; note = 2'-fluoroguanosine
  modified_base 10: mod_base = OTHER; note = 2'-fluorocytidine
  modified_base 11: mod_base = OTHER; note = 2'-fluorocytidine
  modified_base 12: mod_base = um
  modified_base 13: mod_base = OTHER; note = 2'-O-methyladenosine
  modified_base 14: mod_base = OTHER; note = 2'-O-methyladenosine
  modified_base 15: mod_base = um
  modified_base 16: mod_base = gm
  modified_base 17: mod_base = OTHER; note = 2'-O-methyladenosine
  modified_base 18: mod_base = um
  modified_base 19: mod_base = OTHER; note = 2'-O-methylguanosine with a 3'-phosphorothioate linkage
  modified_base 20: mod_base = OTHER; note = 2'-O-methyladenosine with a 3'-phosphorothioate linkage
  modified_base 21: mod_base = OTHER; note = 2'-O-methyladenosine
actgcaaagcctaatgatgaa

SEQ ID NO: 557 - RNA, 21 nt, synthetic construct
  source 1..21: mol_type = other RNA
  modified_base 1: mod_base = OTHER; note = 2'-O-methyladenosine with a 3'-phosphorothioate linkage
  modified_base 2: mod_base = OTHER; note = 2'-O-methylcytidine with a 3'-phosphorothioate linkage
  modified_base 3: mod_base = OTHER; note = 2'-O-methyladenosine
  modified_base 4: mod_base = cm
  modified_base 5: mod_base = OTHER; note = 2'-O-methyladenosine
  modified_base 6: mod_base = OTHER; note = 2'-O-methyladenosine
  modified_base 7: mod_base = gm
  modified_base 8: mod_base = gm
  modified_base 9: mod_base = OTHER; note = 2'-fluorouridine
  modified_base 10: mod_base = OTHER; note = 2'-fluoroadenosine
  modified_base 11: mod_base = OTHER; note = 2'-fluoroadenosine
  modified_base 12: mod_base = OTHER; note = 2'-O-methyladenosine
  modified_base 13: mod_base = cm
  modified_base 14: mod_base = cm
  modified_base 15: mod_base = um
  modified_base 16: mod_base = gm
  modified_base 17: mod_base = cm
  modified_base 18: mod_base = um
  modified_base 19: mod_base = OTHER; note = 2'-O-methyladenosine with a 3'-phosphorothioate linkage
  modified_base 20: mod_base = OTHER; note = 2'-O-methyluridine with a 3'-phosphorothioate linkage
  modified_base 21: mod_base = OTHER; note = 2'-O-methyladenosine
acacaaggtaaacctgctata

SEQ ID NO: 558 - RNA, 21 nt, synthetic construct
  source 1..21: mol_type = other RNA
  modified_base 1: mod_base = OTHER; note = 2'-O-methyluridine with a 3'-phosphorothioate linkage
  modified_base 2: mod_base = OTHER; note = 2'-O-methylguanosine with a 3'-phosphorothioate linkage
  modified_base 3: mod_base = OTHER; note = 2'-O-methyladenosine
  modified_base 4: mod_base = um
  modified_base 5: mod_base = OTHER; note = 2'-O-methyladenosine
  modified_base 6: mod_base = OTHER; note = 2'-O-methyladenosine
  modified_base 7: mod_base = um
  modified_base 8: mod_base = um
  modified_base 9: mod_base = OTHER; note = 2'-fluoroadenosine
  modified_base 10: mod_base = OTHER; note = 2'-fluorouridine
  modified_base 11: mod_base = OTHER; note = 2'-fluoroguanosine
  modified_base 12: mod_base = um
  modified_base 13: mod_base = um
  modified_base 14: mod_base = OTHER; note = 2'-O-methyladenosine
  modified_base 15: mod_base = OTHER; note = 2'-O-methyladenosine
  modified_base 16: mod_base = OTHER; note = 2'-O-methyladenosine
  modified_base 17: mod_base = OTHER; note = 2'-O-methyladenosine
  modified_base 18: mod_base = OTHER; note = 2'-O-methyladenosine
  modified_base 19: mod_base = OTHER; note = 2'-O-methylguanosine with a 3'-phosphorothioate linkage
  modified_base 20: mod_base = OTHER; note = 2'-O-methyladenosine with a 3'-phosphorothioate linkage
  modified_base 21: mod_base = OTHER; note = 2'-O-methyladenosine
tgataattatgttaaaaagaa

SEQ ID NO: 559 - RNA, 21 nt, synthetic construct
  source 1..21: mol_type = other RNA
  modified_base 1: mod_base = OTHER; note = 2'-O-methyladenosine with a 3'-phosphorothioate linkage
  modified_base 2: mod_base = OTHER; note = 2'-O-methyladenosine with a 3'-phosphorothioate linkage
  modified_base 3: mod_base = gm
  modified_base 4: mod_base = OTHER; note = 2'-O-methyladenosine
  modified_base 5: mod_base = cm
  modified_base 6: mod_base = um
  modified_base 7: mod_base = gm
  modified_base 8: mod_base = cm
  modified_base 9: mod_base = OTHER; note = 2'-fluoroadenosine
  modified_base 10: mod_base = OTHER; note = 2'-fluoroadenosine
  modified_base 11: mod_base = OTHER; note = 2'-fluoroadenosine
  modified_base 12: mod_base = gm
  modified_base 13: mod_base = cm
  modified_base 14: mod_base = cm
  modified_base 15: mod_base = um
  modified_base 16: mod_base = OTHER; note = 2'-O-methyladenosine
  modified_base 17: mod_base = OTHER; note = 2'-O-methyladenosine
  modified_base 18: mod_base = um
  modified_base 19: mod_base = OTHER; note = 2'-O-methylguanosine with a 3'-phosphorothioate linkage
  modified_base 20: mod_base = OTHER; note = 2'-O-methyladenosine with a 3'-phosphorothioate linkage
  modified_base 21: mod_base = OTHER; note = 2'-O-methyladenosine
aagactgcaaagcctaatgaa

SEQ ID NO: 560 - RNA, 21 nt, synthetic construct
  source 1..21: mol_type = other RNA
  modified_base 1: mod_base = OTHER; note = 2'-O-methyladenosine with a 3'-phosphorothioate linkage
  modified_base 2: mod_base = OTHER; note = 2'-O-methyladenosine with a 3'-phosphorothioate linkage
  modified_base 3: mod_base = OTHER; note = 2'-O-methyladenosine
  modified_base 4: mod_base = um
  modified_base 5: mod_base = OTHER; note = 2'-O-methyladenosine
  modified_base 6: mod_base = um
  modified_base 7: mod_base = OTHER; note = 2'-O-methyladenosine
  modified_base 8: mod_base = um
  modified_base 9: mod_base = OTHER; note = 2'-fluorouridine
  modified_base 10: mod_base = OTHER; note = 2'-fluoroadenosine
  modified_base 11: mod_base = OTHER; note = 2'-fluorocytidine
  modified_base 12: mod_base = OTHER; note = 2'-O-methyladenosine
  modified_base 13: mod_base = OTHER; note = 2'-O-methyladenosine
  modified_base 14: mod_base = OTHER; note = 2'-O-methyladenosine
  modified_base 15: mod_base = OTHER; note = 2'-O-methyladenosine
  modified_base 16: mod_base = gm
  modified_base 17: mod_base = um
  modified_base 18: mod_base = OTHER; note = 2'-O-methyladenosine
  modified_base 19: mod_base = OTHER; note = 2'-O-methyluridine with a 3'-phosphorothioate linkage
  modified_base 20: mod_base = OTHER; note = 2'-O-methyladenosine with a 3'-phosphorothioate linkage
  modified_base 21: mod_base = OTHER; note = 2'-O-methyladenosine
aaatatattacaaaagtataa

SEQ ID NO: 561 - RNA, 21 nt, synthetic construct
  source 1..21: mol_type = other RNA
  modified_base 1: mod_base = OTHER; note = 2'-O-methyladenosine with a 3'-phosphorothioate linkage
  modified_base 2: mod_base = OTHER; note = 2'-O-methyladenosine with a 3'-phosphorothioate linkage
  modified_base 3: mod_base = cm
  modified_base 4: mod_base = um
  modified_base 5: mod_base = gm
  modified_base 6: mod_base = cm
  modified_base 7: mod_base = um
  modified_base 8: mod_base = cm
  modified_base 9: mod_base = OTHER; note = 2'-fluorouridine
  modified_base 10: mod_base = OTHER; note = 2'-fluorouridine
  modified_base 11: mod_base = OTHER; note = 2'-fluorocytidine
  modified_base 12: mod_base = gm
  modified_base 13: mod_base = um
  modified_base 14: mod_base = OTHER; note = 2'-O-methyladenosine
  modified_base 15: mod_base = um
  modified_base 16: mod_base = um
  modified_base 17: mod_base = OTHER; note = 2'-O-methyladenosine
  modified_base 18: mod_base = OTHER; note = 2'-O-methyladenosine
  modified_base 19: mod_base = OTHER; note = 2'-O-methylguanosine with a 3'-phosphorothioate linkage
  modified_base 20: mod_base = OTHER; note = 2'-O-methyladenosine with a 3'-phosphorothioate linkage
  modified_base 21: mod_base = OTHER; note = 2'-O-methyladenosine
aactgctcttcgtattaagaa

SEQ ID NO: 562 - RNA, 21 nt, synthetic construct
  source 1..21: mol_type = other RNA
  modified_base 1: mod_base = OTHER; note = 2'-O-methylcytidine with a 3'-phosphorothioate linkage
  modified_base 2: mod_base = OTHER; note = 2'-O-methylcytidine with a 3'-phosphorothioate linkage
  modified_base 3: mod_base = um
  modified_base 4: mod_base = cm
  modified_base 5: mod_base = OTHER; note = 2'-O-methyladenosine
  modified_base 6: mod_base = OTHER; note = 2'-O-methyladenosine
  modified_base 7: mod_base = OTHER; note = 2'-O-methyladenosine
  modified_base 8: mod_base = gm
  modified_base 9: mod_base = OTHER; note = 2'-fluoroadenosine
  modified_base 10: mod_base = OTHER; note = 2'-fluorouridine
  modified_base 11: mod_base = OTHER; note = 2'-fluoroadenosine
  modified_base 12: mod_base = OTHER; note = 2'-O-methyladenosine
  modified_base 13: mod_base = gm
  modified_base 14: mod_base = OTHER; note = 2'-O-methyladenosine
  modified_base 15: mod_base = cm
  modified_base 16: mod_base = OTHER; note = 2'-O-methyladenosine
  modified_base 17: mod_base = gm
  modified_base 18: mod_base = um
  modified_base 19: mod_base = OTHER; note = 2'-O-methyladenosine with a 3'-phosphorothioate linkage
  modified_base 20: mod_base = OTHER; note = 2'-O-methylcytidine with a 3'-phosphorothioate linkage
  modified_base 21: mod_base = OTHER; note = 2'-O-methyladenosine
cctcaaagataagacagtaca

SEQ ID NO: 563 - RNA, 21 nt, synthetic construct
  source 1..21: mol_type = other RNA
  modified_base 1: mod_base = OTHER; note = 2'-O-methyluridine with a 3'-phosphorothioate linkage
  modified_base 2: mod_base = OTHER; note = 2'-O-methyluridine with a 3'-phosphorothioate linkage
  modified_base 3: mod_base = OTHER; note = 2'-O-methyladenosine
  modified_base 4: mod_base = cm
  modified_base 5: mod_base = um
  modified_base 6: mod_base = um
  modified_base 7: mod_base = gm
  modified_base 8: mod_base = OTHER; note = 2'-O-methyladenosine
  modified_base 9: mod_base = OTHER; note = 2'-fluoroadenosine
  modified_base 10: mod_base = OTHER; note = 2'-fluorocytidine
  modified_base 11: mod_base = OTHER; note = 2'-fluorocytidine
  modified_base 12: mod_base = OTHER; note = 2'-O-methyladenosine
  modified_base 13: mod_base = OTHER; note = 2'-O-methyladenosine
  modified_base 14: mod_base = gm
  modified_base 15: mod_base = OTHER; note = 2'-O-methyladenosine
  modified_base 16: mod_base = gm
  modified_base 17: mod_base = cm
  modified_base 18: mod_base = OTHER; note = 2'-O-methyladenosine
  modified_base 19: mod_base = OTHER; note = 2'-O-methylcytidine with a 3'-phosphorothioate linkage
  modified_base 20: mod_base = OTHER; note = 2'-O-methyladenosine with a 3'-phosphorothioate linkage
  modified_base 21: mod_base = OTHER; note = 2'-O-methyladenosine
ttacttgaaccaagagcacaa

SEQ ID NO: 564 - RNA, 21 nt, synthetic construct
  source 1..21: mol_type = other RNA
  modified_base 1: mod_base = OTHER; note = 2'-O-methyluridine with a 3'-phosphorothioate linkage
  modified_base 2: mod_base = OTHER; note = 2'-O-methyladenosine with a 3'-phosphorothioate linkage
  modified_base 3: mod_base = um
  modified_base 4: mod_base = cm
  modified_base 5: mod_base = um
  modified_base 6: mod_base = cm
  modified_base 7: mod_base = OTHER; note = 2'-O-methyladenosine
  modified_base 8: mod_base = OTHER; note = 2'-O-methyladenosine
  modified_base 9: mod_base = OTHER; note = 2'-fluorocytidine
  modified_base 10: mod_base = OTHER; note = 2'-fluorouridine
  modified_base 11: mod_base = OTHER; note = 2'-fluorouridine
  modified_base 12: mod_base = um
  modified_base 13: mod_base = gm
  modified_base 14: mod_base = um
  modified_base 15: mod_base = gm
  modified_base 16: mod_base = um
  modified_base 17: mod_base = cm
  modified_base 18: mod_base = OTHER; note = 2'-O-methyladenosine
  modified_base 19: mod_base = OTHER; note = 2'-O-methyladenosine with a 3'-phosphorothioate linkage
  modified_base 20: mod_base = OTHER; note = 2'-O-methyladenosine with a 3'-phosphorothioate linkage
  modified_base 21: mod_base = OTHER; note = 2'-O-methyladenosine
tatctcaactttgtgtcaaaa

SEQ ID NO: 565 - RNA, 21 nt, synthetic construct
  source 1..21: mol_type = other RNA
  modified_base 1: mod_base = OTHER; note = 2'-O-methyluridine with a 3'-phosphorothioate linkage
  modified_base 2: mod_base = OTHER; note = 2'-O-methylguanosine with a 3'-phosphorothioate linkage
  modified_base 3: mod_base = cm
  modified_base 4: mod_base = OTHER; note = 2'-O-methyladenosine
  modified_base 5: mod_base = OTHER; note = 2'-O-methyladenosine
  modified_base 6: mod_base = OTHER; note = 2'-O-methyladenosine
  modified_base 7: mod_base = gm
  modified_base 8: mod_base = cm
  modified_base 9: mod_base = OTHER; note = 2'-fluorocytidine
  modified_base 10: mod_base = OTHER; note = 2'-fluorouridine
  modified_base 11: mod_base = OTHER; note = 2'-fluoroadenosine
  modified_base 12: mod_base = OTHER; note = 2'-O-methyladenosine
  modified_base 13: mod_base = um
  modified_base 14: mod_base = gm
  modified_base 15: mod_base = OTHER; note = 2'-O-methyladenosine
  modified_base 16: mod_base = um
  modified_base 17: mod_base = gm
  modified_base 18: mod_base = OTHER; note = 2'-O-methyladenosine
  modified_base 19: mod_base = OTHER; note = 2'-O-methyluridine with a 3'-phosphorothioate linkage
  modified_base 20: mod_base = OTHER; note = 2'-O-methyladenosine with a 3'-phosphorothioate linkage
  modified_base 21: mod_base = OTHER; note = 2'-O-methyladenosine
tgcaaagcctaatgatgataa

SEQ ID NO: 566 - RNA, 21 nt, synthetic construct
  source 1..21: mol_type = other RNA
  modified_base 1: mod_base = OTHER; note = 2'-O-methyluridine with a 3'-phosphorothioate linkage
  modified_base 2: mod_base = OTHER; note = 2'-O-methyladenosine with a 3'-phosphorothioate linkage
  modified_base 3: mod_base = um
  modified_base 4: mod_base = um
  modified_base 5: mod_base = OTHER; note = 2'-O-methyladenosine
  modified_base 6: mod_base = cm
  modified_base 7: mod_base = OTHER; note = 2'-O-methyladenosine
  modified_base 8: mod_base = OTHER; note = 2'-O-methyladenosine
  modified_base 9: mod_base = OTHER; note = 2'-fluoroadenosine
  modified_base 10: mod_base = OTHER; note = 2'-fluoroadenosine
  modified_base 11: mod_base = OTHER; note = 2'-fluoroguanosine
  modified_base 12: mod_base = um
  modified_base 13: mod_base = OTHER; note = 2'-O-methyladenosine
  modified_base 14: mod_base = um
  modified_base 15: mod_base = OTHER; note = 2'-O-methyladenosine
  modified_base 16: mod_base = OTHER; note = 2'-O-methyladenosine
  modified_base 17: mod_base = OTHER; note = 2'-O-methyladenosine
  modified_base 18: mod_base = OTHER; note = 2'-O-methyladenosine
  modified_base 19: mod_base = OTHER; note = 2'-O-methyluridine with a 3'-phosphorothioate linkage
  modified_base 20: mod_base = OTHER; note = 2'-O-methyladenosine with a 3'-phosphorothioate linkage
  modified_base 21: mod_base = OTHER; note = 2'-O-methyladenosine
tattacaaaagtataaaataa

SEQ ID NO: 567 - RNA, 21 nt, synthetic construct
  source 1..21: mol_type = other RNA
  modified_base 1: mod_base = OTHER; note = 2'-O-methyluridine with a 3'-phosphorothioate linkage
  modified_base 2: mod_base = OTHER; note = 2'-O-methylguanosine with a 3'-phosphorothioate linkage
  modified_base 3: mod_base = gm
  modified_base 4: mod_base = um
  modified_base 5: mod_base = OTHER; note = 2'-O-methyladenosine
  modified_base 6: mod_base = um
  modified_base 7: mod_base = cm
  modified_base 8: mod_base = um
  modified_base 9: mod_base = OTHER; note = 2'-fluoroguanosine
  modified_base 10: mod_base = OTHER; note = 2'-fluoroadenosine
  modified_base 11: mod_base = OTHER; note = 2'-fluoroadenosine
  modified_base 12: mod_base = um
  modified_base 13: mod_base = OTHER; note = 2'-O-methyladenosine
  modified_base 14: mod_base = um
  modified_base 15: mod_base = cm
  modified_base 16: mod_base = OTHER; note = 2'-O-methyladenosine
  modified_base 17: mod_base = um
  modified_base 18: mod_base = gm
  modified_base 19: mod_base = OTHER; note = 2'-O-methyladenosine with a 3'-phosphorothioate linkage
  modified_base 20: mod_base = OTHER; note = 2'-O-methyladenosine with a 3'-phosphorothioate linkage
  modified_base 21: mod_base = OTHER; note = 2'-O-methyladenosine
tggtatctgaatatcatgaaa

SEQ ID NO: 568 - RNA, 21 nt, synthetic construct
  source 1..21: mol_type = other RNA
  modified_base 1: mod_base = OTHER; note = 2'-O-methyluridine with a 3'-phosphorothioate linkage and a 5' inverted abasic moiety connected via a 5' to 5' phosphorothioate linkage
  modified_base 2: mod_base = um
  modified_base 3: mod_base = cm
  modified_base 4: mod_base = OTHER; note = 2'-O-methyladenosine
  modified_base 5: mod_base = OTHER; note = 2'-O-methyladenosine
  modified_base 6: mod_base = OTHER; note = 2'-O-methyladenosine
  modified_base 7: mod_base = cm
  modified_base 8: mod_base = gm
  modified_base 9: mod_base = OTHER; note = 2'-fluoroadenosine
  modified_base 10: mod_base = OTHER; note = 2'-fluoroguanosine
  modified_base 11: mod_base = OTHER; note = 2'-fluorocytidine
  modified_base 12: mod_base = um
  modified_base 13: mod_base = gm
  modified_base 14: mod_base = OTHER; note = 2'-O-methyladenosine
  modified_base 15: mod_base = cm
  modified_base 16: mod_base = OTHER; note = 2'-O-methyladenosine
  modified_base 17: mod_base = um
  modified_base 18: mod_base = cm
  modified_base 19: mod_base = OTHER; note = 2'-O-methyluridine with a 3'-phosphorothioate linkage
  modified_base 20: mod_base = OTHER; note = 2'-O-methyladenosine with a 3'-phosphorothioate linkage
  modified_base 21: mod_base = OTHER; note = 2'-O-methyladenosine
ttcaaacgagctgacatctaa

SEQ ID NO: 569 - RNA, 21 nt, synthetic construct
  source 1..21: mol_type = other RNA
  modified_base 1: mod_base = OTHER; note = 2'-O-methyladenosine with a 3'-phosphorothioate linkage and a 5' inverted abasic moiety connected via a 5' to 5' phosphorothioate linkage
  modified_base 2: mod_base = um
  modified_base 3: mod_base = OTHER; note = 2'-O-methyladenosine
  modified_base 4: mod_base = um
  modified_base 5: mod_base = cm
  modified_base 6: mod_base = um
  modified_base 7: mod_base = cm
  modified_base 8: mod_base = OTHER; note = 2'-O-methyladenosine
  modified_base 9: mod_base = OTHER; note = 2'-fluoroadenosine
  modified_base 10: mod_base = OTHER; note = 2'-fluorocytidine
  modified_base 11: mod_base = OTHER; note = 2'-fluorouridine
  modified_base 12: mod_base = um
  modified_base 13: mod_base = um
  modified_base 14: mod_base = gm
  modified_base 15: mod_base = um
  modified_base 16: mod_base = gm
  modified_base 17: mod_base = um
  modified_base 18: mod_base = cm
  modified_base 19: mod_base = OTHER; note = 2'-O-methyladenosine with a 3'-phosphorothioate linkage
  modified_base 20: mod_base = OTHER; note = 2'-O-methyladenosine with a 3'-phosphorothioate linkage
  modified_base 21: mod_base = OTHER; note = 2'-O-methyladenosine
atatctcaactttgtgtcaaa

SEQ ID NO: 570 - RNA, 21 nt, synthetic construct
  source 1..21: mol_type = other RNA
  modified_base 1: mod_base = OTHER; note = 2'-O-methyluridine with a 3'-phosphorothioate linkage and a 5' inverted abasic moiety connected via a 5' to 5' phosphorothioate linkage
  modified_base 2: mod_base = um
  modified_base 3: mod_base = gm
  modified_base 4: mod_base = OTHER; note = 2'-O-methyladenosine
  modified_base 5: mod_base = um
  modified_base 6: mod_base = gm
  modified_base 7: mod_base = OTHER; note = 2'-O-methyladenosine
  modified_base 8: mod_base = um
  modified_base 9: mod_base = OTHER; note = 2'-fluoroadenosine
  modified_base 10: mod_base = OTHER; note = 2'-fluorocytidine
  modified_base 11: mod_base = OTHER; note = 2'-fluoroadenosine
  modified_base 12: mod_base = OTHER; note = 2'-O-methyladenosine
  modified_base 13: mod_base = um
  modified_base 14: mod_base = gm
  modified_base 15: mod_base = OTHER; note = 2'-O-methyladenosine
  modified_base 16: mod_base = OTHER; note = 2'-O-methyladenosine
  modified_base 17: mod_base = um
  modified_base 18: mod_base = gm
  modified_base 19: mod_base = OTHER; note = 2'-O-methyluridine with a 3'-phosphorothioate linkage
  modified_base 20: mod_base = OTHER; note = 2'-O-methylguanosine with a 3'-phosphorothioate linkage
  modified_base 21: mod_base = OTHER; note = 2'-O-methyladenosine
ttgatgatacaatgaatgtga

SEQ ID NO: 571 - RNA, 21 nt, synthetic construct
  source 1..21: mol_type = other RNA
  modified_base 1: mod_base = OTHER; note = 2'-O-methyladenosine with a 3'-phosphorothioate linkage and a 5' inverted abasic moiety connected via a 5' to 5' phosphorothioate linkage
  modified_base 2: mod_base = um
  modified_base 3: mod_base = gm
  modified_base 4: mod_base = OTHER; note = 2'-O-methyladenosine
  modified_base 5: mod_base = OTHER; note = 2'-O-methyladenosine
  modified_base 6: mod_base = um
  modified_base 7: mod_base = gm
  modified_base 8: mod_base = um
  modified_base 9: mod_base = OTHER; note = 2'-fluoroguanosine
  modified_base 10: mod_base = OTHER; note = 2'-fluoroadenosine
  modified_base 11: mod_base = OTHER; note = 2'-fluoroadenosine
  modified_base 12: mod_base = um
  modified_base 13: mod_base = OTHER; note = 2'-O-methyladenosine
  modified_base 14: mod_base = um
  modified_base 15: mod_base = cm
  modified_base 16: mod_base = um
  modified_base 17: mod_base = um
  modified_base 18: mod_base = um
  modified_base 19: mod_base = OTHER; note = 2'-O-methylguanosine with a 3'-phosphorothioate linkage
  modified_base 20: mod_base = OTHER; note = 2'-O-methyladenosine with a 3'-phosphorothioate linkage
  modified_base 21: mod_base = OTHER; note = 2'-O-methyladenosine
atgaatgtgaatatctttgaa

SEQ ID NO: 572 - RNA, 21 nt, synthetic construct
  source 1..21: mol_type = other RNA
  modified_base 1: mod_base = OTHER; note = 2'-O-methylguanosine with a 3'-phosphorothioate linkage and a 5' inverted abasic moiety connected via a 5' to 5' phosphorothioate linkage
  modified_base 2: mod_base = gm
  modified_base 3: mod_base = cm
  modified_base 4: mod_base = um
  modified_base 5: mod_base = cm
  modified_base 6: mod_base = cm
  modified_base 7: mod_base = um
  modified_base 8: mod_base = gm
  modified_base 9: mod_base = OTHER; note = 2'-fluoroadenosine
  modified_base 10: mod_base = OTHER; note = 2'-fluoroadenosine
  modified_base 11: mod_base = OTHER; note = 2'-fluoroadenosine
  modified_base 12: mod_base = um
  modified_base 13: mod_base = gm
  modified_base 14: mod_base = cm
  modified_base 15: mod_base = um
  modified_base 16: mod_base = um
  modified_base 17: mod_base = gm
  modified_base 18: mod_base = OTHER; note = 2'-O-methyladenosine
  modified_base 19: mod_base = OTHER; note = 2'-O-methyluridine with a 3'-phosphorothioate linkage
  modified_base 20: mod_base = OTHER; note = 2'-O-methylguanosine with a 3'-phosphorothioate linkage
  modified_base 21: mod_base = OTHER; note = 2'-O-methyladenosine
ggctcctgaaatgcttgatga

SEQ ID NO: 573 - RNA, 21 nt, synthetic construct
  source 1..21: mol_type = other RNA
  modified_base 1: mod_base = OTHER; note = 2'-O-methyladenosine with a 3'-phosphorothioate linkage and a 5' inverted abasic moiety connected via a 5' to 5' phosphorothioate linkage
  modified_base 2: mod_base = um
  modified_base 3: mod_base = OTHER; note = 2'-O-methyladenosine
  modified_base 4: mod_base = um
  modified_base 5: mod_base = cm
  modified_base 6: mod_base = um
  modified_base 7: mod_base = cm
  modified_base 8: mod_base = OTHER; note = 2'-O-methyladenosine
  modified_base 9: mod_base = OTHER; note = 2'-fluoroadenosine
  modified_base 10: mod_base = OTHER; note = 2'-fluorocytidine
  modified_base 11: mod_base = OTHER; note = 2'-fluorouridine
  modified_base 12: mod_base = um
  modified_base 13: mod_base = um
  modified_base 14: mod_base = gm
  modified_base 15: mod_base = um
  modified_base 16: mod_base = OTHER; note = 2'-O-hexadecyl methylguanosine
  modified_base 17: mod_base = um
  modified_base 18: mod_base = cm
  modified_base 19: mod_base = OTHER; note = 2'-O-methyladenosine with a 3'-phosphorothioate linkage
  modified_base 20: mod_base = OTHER; note = 2'-O-methyladenosine with a 3'-phosphorothioate linkage
  modified_base 21: mod_base = OTHER; note = 2'-O-methyladenosine
atatctcaactttgtgtcaaa

SEQ ID NO: 574 - RNA, 21 nt, synthetic construct
  source 1..21: mol_type = other RNA
  modified_base 1: mod_base = OTHER; note = 2'-O-methyluridine with a 3'-phosphorothioate linkage and a 5' inverted abasic moiety connected via a 5' to 5' phosphorothioate linkage
  modified_base 2: mod_base = um
  modified_base 3: mod_base = gm
  modified_base 4: mod_base = OTHER; note = 2'-O-methyladenosine
  modified_base 5: mod_base = um
  modified_base 6: mod_base = gm
  modified_base 7: mod_base = OTHER; note = 2'-O-methyladenosine
  modified_base 8: mod_base = um
  modified_base 9: mod_base = OTHER; note = 2'-fluoroadenosine
  modified_base 10: mod_base = OTHER; note = 2'-fluorocytidine
  modified_base 11: mod_base = OTHER; note = 2'-fluoroadenosine
  modified_base 12: mod_base = OTHER; note = 2'-O-methyladenosine
  modified_base 13: mod_base = um
  modified_base 14: mod_base = gm
  modified_base 15: mod_base = OTHER; note = 2'-O-methyladenosine
  modified_base 16: mod_base = OTHER; note = 2'-O-hexadecyl adenosine
  modified_base 17: mod_base = um
  modified_base 18: mod_base = gm
  modified_base 19: mod_base = OTHER; note = 2'-O-methyluridine with a 3'-phosphorothioate linkage
  modified_base 20: mod_base = OTHER; note = 2'-O-methylguanosine with a 3'-phosphorothioate linkage
  modified_base 21: mod_base = OTHER; note = 2'-O-methyladenosine
ttgatgatacaatgaatgtga

SEQ ID NO: 575 - RNA, 21 nt, synthetic construct
  source 1..21: mol_type = other RNA
  modified_base 1: mod_base = OTHER; note = 2'-O-methylguanosine with a 3'-phosphorothioate linkage and a 5' inverted abasic moiety connected via a 5' to 5' phosphorothioate linkage
  modified_base 2: mod_base = gm
  modified_base 3: mod_base = cm
  modified_base 4: mod_base = um
  modified_base 5: mod_base = cm
  modified_base 6: mod_base = cm
  modified_base 7: mod_base = um
  modified_base 8: mod_base = gm
  modified_base 9: mod_base = OTHER; note = 2'-fluoroadenosine
  modified_base 10: mod_base = OTHER; note = 2'-fluoroadenosine
  modified_base 11: mod_base = OTHER; note = 2'-fluoroadenosine
  modified_base 12: mod_base = um
  modified_base 13: mod_base = gm
  modified_base 14: mod_base = cm
  modified_base 15: mod_base = um
  modified_base 16: mod_base = OTHER; note = 2'-O-hexadecyl uridine
  modified_base 17: mod_base = gm
  modified_base 18: mod_base = OTHER; note = 2'-O-methyladenosine
  modified_base 19: mod_base = OTHER; note = 2'-O-methyluridine with a 3'-phosphorothioate linkage
  modified_base 20: mod_base = OTHER; note = 2'-O-methylguanosine with a 3'-phosphorothioate linkage
  modified_base 21: mod_base = OTHER; note = 2'-O-methyladenosine
ggctcctgaaatgcttgatga

SEQ ID NO: 576 - RNA, 21 nt, synthetic construct
  source 1..21: mol_type = other RNA
  modified_base 1: mod_base = OTHER; note = 2'-O-methyluridine with a 3'-phosphorothioate linkage and a 5' inverted abasic moiety connected via a 5' to 5' phosphorothioate linkage
  modified_base 2: mod_base = um
  modified_base 3: mod_base = cm
  modified_base 4: mod_base = OTHER; note = 2'-O-methyladenosine
  modified_base 5: mod_base = OTHER; note = 2'-O-methyladenosine
  modified_base 6: mod_base = OTHER; note = 2'-O-methyladenosine
  modified_base 7: mod_base = cm
  modified_base 8: mod_base = gm
  modified_base 9: mod_base = OTHER; note = 2'-fluoroadenosine
  modified_base 10: mod_base = OTHER; note = 2'-fluoroguanosine
  modified_base 11: mod_base = OTHER; note = 2'-fluorocytidine
  modified_base 12: mod_base = um
  modified_base 13: mod_base = gm
  modified_base 14: mod_base = OTHER; note = 2'-O-methyladenosine
  modified_base 15: mod_base = cm
  modified_base 16: mod_base = OTHER; note = 2'-O-hexadecyl adenosine
  modified_base 17: mod_base = um
  modified_base 18: mod_base = cm
  modified_base 19: mod_base = OTHER; note = 2'-O-methyluridine with a 3'-phosphorothioate linkage
  modified_base 20: mod_base = OTHER; note = 2'-O-methyladenosine with a 3'-phosphorothioate linkage
  modified_base 21: mod_base = OTHER; note = 2'-O-methyladenosine
ttcaaacgagctgacatctaa

SEQ ID NO: 577 - RNA, 21 nt, synthetic construct
  source 1..21: mol_type = other RNA
  modified_base 1: mod_base = OTHER; note = 2'-O-methyladenosine with a 3'-phosphorothioate linkage and a 5' inverted abasic moiety connected via a 5' to 5' phosphorothioate linkage
  modified_base 2: mod_base = um
  modified_base 3: mod_base = gm
  modified_base 4: mod_base = OTHER; note = 2'-O-methyladenosine
  modified_base 5: mod_base = OTHER; note = 2'-O-methyladenosine
  modified_base 6: mod_base = um
  modified_base 7: mod_base = gm
  modified_base 8: mod_base = um
  modified_base 9: mod_base = OTHER; note = 2'-fluoroguanosine
  modified_base 10: mod_base = OTHER; note = 2'-fluoroadenosine
  modified_base 11: mod_base = OTHER; note = 2'-fluoroadenosine
  modified_base 12: mod_base = um
  modified_base 13: mod_base = OTHER; note = 2'-O-methyladenosine
  modified_base 14: mod_base = um
  modified_base 15: mod_base = cm
  modified_base 16: mod_base = OTHER; note = 2'-O-hexadecyl uridine
  modified_base 17: mod_base = um
  modified_base 18: mod_base = um
  modified_base 19: mod_base = OTHER; note = 2'-O-methylguanosine with a 3'-phosphorothioate linkage
  modified_base 20: mod_base = OTHER; note = 2'-O-methyladenosine with a 3'-phosphorothioate linkage
  modified_base 21: mod_base = OTHER; note = 2'-O-methyladenosine
atgaatgtgaatatctttgaa

SEQ ID NO: 578 - RNA, 21 nt, synthetic construct
  source 1..21: mol_type = other RNA
  modified_base 1: mod_base = OTHER; note = 2'-O-methylcytidine with a 3'-phosphorothioate linkage
  modified_base 2: mod_base = OTHER; note = 2'-O-methyluridine with a 3'-phosphorothioate linkage
  modified_base 3: mod_base = OTHER; note = 2'-O-methyladenosine
  modified_base 4: mod_base = OTHER; note = 2'-O-methyladenosine
  modified_base 5: mod_base = um
  modified_base 6: mod_base = gm
  modified_base 7: mod_base = OTHER; note = 2'-fluoroadenosine
  modified_base 8: mod_base = um
  modified_base 9: mod_base = OTHER; note = 2'-fluoroguanosine
  modified_base 10: mod_base = OTHER; note = 2'-fluoroadenosine
  modified_base 11: mod_base = OTHER; note = 2'-fluorouridine
  modified_base 12: mod_base = OTHER; note = 2'-O-methyladenosine
  modified_base 13: mod_base = OTHER; note = 2'-O-methyladenosine
  modified_base 14: mod_base = um
  modified_base 15: mod_base = um
  modified_base 16: mod_base = OTHER; note = 2'-O-docosyl adenosine
  modified_base 17: mod_base = um
  modified_base 18: mod_base = gm
  modified_base 19: mod_base = OTHER; note = 2'-O-methyluridine with a 3'-phosphorothioate linkage
  modified_base 20: mod_base = OTHER; note = 2'-O-methyluridine with a 3'-phosphorothioate linkage
  modified_base 21: mod_base = OTHER; note = 2'-O-methyladenosine
ctaatgatgataattatgtta

SEQ ID NO: 579 - RNA, 21 nt, synthetic construct
  source 1..21: mol_type = other RNA
  modified_base 1: mod_base = OTHER; note = 2'-O-methylguanosine with a 5' inverted abasic moiety connected via a 5' to 5' phosphorothioate linkage
  modified_base 2: mod_base = um
  modified_base 3: mod_base = cm
  modified_base 4: mod_base = um
  modified_base 5: mod_base = gm
  modified_base 6: mod_base = um
  modified_base 7: mod_base = cm
  modified_base 8: mod_base = OTHER; note = 2'-O-methyladenosine
  modified_base 9: mod_base = OTHER; note = 2'-fluorouridine
  modified_base 10: mod_base = OTHER; note = 2'-fluoroadenosine
  modified_base 11: mod_base = OTHER; note = 2'-fluoroguanosine
  modified_base 12: mod_base = um
  modified_base 13: mod_base = um
  modified_base 14: mod_base = cm
  modified_base 15: mod_base = cm
  modified_base 16: mod_base = OTHER; note = 2'-O-methyladenosine
  modified_base 17: mod_base = OTHER; note = 2'-O-methyladenosine
  modified_base 18: mod_base = cm
  modified_base 19: mod_base = OTHER; note = 2'-O-methyladenosine
  modified_base 20: mod_base = OTHER; note = 2'-O-methyladenosine
  modified_base 21: mod_base = OTHER; note = 2'-O-methyluridine with a 3' inverted abasic moiety connected via a 3'-phosphorothioate linkage
gtctgtcatagttccaacaat

SEQ ID NO: 580 - RNA, 21 nt, synthetic construct
  source 1..21: mol_type = other RNA
  modified_base 1: mod_base = OTHER; note = 2'-O-methylcytidine with a 5' inverted abasic moiety connected via a 5' to 5' phosphorothioate linkage
  modified_base 2: mod_base = um
  modified_base 3: mod_base = OTHER; note = 2'-O-methyladenosine
  modified_base 4: mod_base = OTHER; note = 2'-O-methyladenosine
  modified_base 5: mod_base = um
  modified_base 6: mod_base = gm
  modified_base 7: mod_base = OTHER; note = 2'-fluoroadenosine
  modified_base 8: mod_base = um
  modified_base 9: mod_base = OTHER; note = 2'-fluoroguanosine
  modified_base 10: mod_base = OTHER; note = 2'-fluoroadenosine
  modified_base 11: mod_base = OTHER; note = 2'-fluorouridine
  modified_base 12: mod_base = OTHER; note = 2'-O-methyladenosine
  modified_base 13: mod_base = OTHER; note = 2'-O-methyladenosine
  modified_base 14: mod_base = um
  modified_base 15: mod_base = um
  modified_base 16: mod_base = OTHER; note = 2'-O-methyladenosine
  modified_base 17: mod_base = um
  modified_base 18: mod_base = gm
  modified_base 19: mod_base = um
  modified_base 20: mod_base = um
  modified_base 21: mod_base = OTHER; note = 2'-O-methyladenosine with a 3' inverted abasic moiety connected via a 3'-phosphorothioate linkage
ctaatgatgataattatgtta

SEQ ID NO: 581 - RNA, 21 nt, synthetic construct
  source 1..21: mol_type = other RNA
  modified_base 1: mod_base = OTHER; note = 2'-O-methylcytidine with a 3'-phosphorothioate linkage and a 5' inverted abasic moiety connected via a 5' to 5' phosphorothioate linkage
  modified_base 2: mod_base = um
  modified_base 3: mod_base = OTHER; note = 2'-O-methyladenosine
  modified_base 4: mod_base = OTHER; note = 2'-O-methyladenosine
  modified_base 5: mod_base = um
  modified_base 6: mod_base = gm
  modified_base 7: mod_base = OTHER; note = 2'-fluoroadenosine
  modified_base 8: mod_base = um
  modified_base 9: mod_base = OTHER; note = 2'-fluoroguanosine
  modified_base 10: mod_base = OTHER; note = 2'-fluoroadenosine
  modified_base 11: mod_base = OTHER; note = 2'-fluorouridine
  modified_base 12: mod_base = OTHER; note = 2'-O-methyladenosine
  modified_base 13: mod_base = OTHER; note = 2'-O-methyladenosine
  modified_base 14: mod_base = um
  modified_base 15: mod_base = um
  modified_base 16: mod_base = OTHER; note = 2'-O-methyladenosine
  modified_base 17: mod_base = um
  modified_base 18: mod_base = gm
  modified_base 19: mod_base = OTHER; note = 2'-O-methyluridine with a 3'-phosphorothioate linkage
  modified_base 20: mod_base = OTHER; note = 2'-O-methyluridine with a 3'-phosphorothioate linkage
  modified_base 21: mod_base = OTHER; note = 2'-O-methyladenosine
ctaatgatgataattatgtta

SEQ ID NO: 582 - RNA, 21 nt, synthetic construct
  source 1..21: mol_type = other RNA
  modified_base 1: mod_base = OTHER; note = 2'-O-methylcytidine with a 3'-phosphorothioate linkage and a 5' inverted abasic moiety connected via a 5' to 5' phosphorothioate linkage
  modified_base 2: mod_base = um
  modified_base 3: mod_base = OTHER; note = 2'-O-methyladenosine
  modified_base 4: mod_base = OTHER; note = 2'-O-methyladenosine
  modified_base 5: mod_base = um
  modified_base 6: mod_base = gm
  modified_base 7: mod_base = OTHER; note = 2'-fluoroadenosine
  modified_base 8: mod_base = um
  modified_base 9: mod_base = OTHER; note = 2'-fluoroguanosine
  modified_base 10: mod_base = OTHER; note = 2'-fluoroadenosine
  modified_base 11: mod_base = OTHER; note = 2'-fluorouridine
  modified_base 12: mod_base = OTHER; note = 2'-O-methyladenosine
  modified_base 13: mod_base = OTHER; note = 2'-O-methyladenosine
  modified_base 14: mod_base = um
  modified_base 15: mod_base = um
  modified_base 16: mod_base = OTHER; note = 2'-O-hexadecyl adenosine
  modified_base 17: mod_base = um
  modified_base 18: mod_base = gm
  modified_base 19: mod_base = OTHER; note = 2'-O-methyluridine with a 3'-phosphorothioate linkage
  modified_base 20: mod_base = OTHER; note = 2'-O-methyluridine with a 3'-phosphorothioate linkage
  modified_base 21: mod_base = OTHER; note = 2'-O-methyladenosine
ctaatgatgataattatgtta

SEQ ID NO: 583 - RNA, 21 nt, synthetic construct
  source 1..21: mol_type = other RNA
  modified_base 1: mod_base = OTHER; note = 2'-O-methylcytidine with a 3'-phosphorothioate linkage and a 5' inverted abasic moiety connected via a 5' to 5' phosphorothioate linkage
  modified_base 2: mod_base = OTHER; note = 2'-O-methyladenosine
  modified_base 3: mod_base = OTHER; note = 2'-O-methyladenosine
  modified_base 4: mod_base = OTHER; note = 2'-O-methyladenosine
  modified_base 5: mod_base = gm
  modified_base 6: mod_base = OTHER; note = 2'-O-methyladenosine
  modified_base 7: mod_base = um
  modified_base 8: mod_base = OTHER; note = 2'-O-methyladenosine
  modified_base 9: mod_base = OTHER; note = 2'-fluoroadenosine
  modified_base 10: mod_base = OTHER; note = 2'-fluoroguanosine
  modified_base 11: mod_base = OTHER; note = 2'-fluoroadenosine
  modified_base 12: mod_base = cm
  modified_base 13: mod_base = OTHER; note = 2'-O-methyladenosine
  modified_base 14: mod_base = gm
  modified_base 15: mod_base = um
  modified_base 16: mod_base = OTHER; note = 2'-O-methyladenosine
  modified_base 17: mod_base = cm
  modified_base 18: mod_base = OTHER; note = 2'-O-methyladenosine
  modified_base 19: mod_base = OTHER; note = 2'-O-methylguanosine with a 3'-phosphorothioate linkage
  modified_base 20: mod_base = OTHER; note = 2'-O-methyluridine with a 3'-phosphorothioate linkage
  modified_base 21: mod_base = OTHER; note = 2'-O-methyladenosine
caaagataagacagtacagta

SEQ ID NO: 584 - RNA, 21 nt, synthetic construct
  source 1..21: mol_type = other RNA
  modified_base 1: mod_base = OTHER; note = 2'-O-methyluridine with a 3'-phosphorothioate linkage and a 5' inverted abasic moiety connected via a 5' to 5' phosphorothioate linkage
  modified_base 2: mod_base = um
  modified_base 3: mod_base = cm
  modified_base 4: mod_base = cm
  modified_base 5: mod_base = OTHER; note = 2'-O-methyladenosine
  modified_base 6: mod_base = um
  modified_base 7: mod_base = um
  modified_base 8: mod_base = um
  modified_base 9: mod_base = OTHER; note = 2'-fluorouridine
  modified_base 10: mod_base = OTHER; note = 2'-fluorocytidine
  modified_base 11: mod_base = OTHER; note = 2'-fluorocytidine
  modified_base 12: mod_base = cm
  modified_base 13: mod_base = cm
  modified_base 14: mod_base = um
  modified_base 15: mod_base = um
  modified_base 16: mod_base = um
  modified_base 17: mod_base = OTHER; note = 2'-O-methyladenosine
  modified_base 18: mod_base = um
  modified_base 19: mod_base = OTHER; note = 2'-O-methylguanosine with a 3'-phosphorothioate linkage
  modified_base 20: mod_base = OTHER; note = 2'-O-methyluridine with a 3'-phosphorothioate linkage
  modified_base 21: mod_base = OTHER; note = 2'-O-methyladenosine
ttccattttcccctttatgta

SEQ ID NO: 585 - RNA, 21 nt, synthetic construct
  source 1..21: mol_type = other RNA
  modified_base 1: mod_base = OTHER; note = 2'-O-methyladenosine with a 3'-phosphorothioate linkage and a 5' inverted abasic moiety connected via a 5' to 5' phosphorothioate linkage
  modified_base 2: mod_base = um
  modified_base 3: mod_base = gm
  modified_base 4: mod_base = OTHER; note = 2'-O-methyladenosine
  modified_base 5: mod_base = OTHER; note = 2'-O-methyladenosine
  modified_base 6: mod_base = um
  modified_base 7: mod_base = gm
  modified_base 8: mod_base = um
  modified_base 9: mod_base = OTHER; note = 2'-fluoroguanosine
  modified_base 10: mod_base = OTHER; note = 2'-fluoroadenosine
  modified_base 11: mod_base = OTHER; note = 2'-fluoroadenosine
  modified_base 12: mod_base = um
  modified_base 13: mod_base = OTHER; note = 2'-O-methyladenosine
  modified_base 14: mod_base = um
  modified_base 15: mod_base = gm
  modified_base 16: mod_base = um
  modified_base 17: mod_base = um
  modified_base 18: mod_base = um
  modified_base 19: mod_base = OTHER; note = 2'-O-methylguanosine with a 3'-phosphorothioate linkage
  modified_base 20: mod_base = OTHER; note = 2'-O-methyladenosine with a 3'-phosphorothioate linkage
  modified_base 21: mod_base = OTHER; note = 2'-O-methyladenosine
atgaatgtgaatatgtttgaa

SEQ ID NO: 586 - RNA, 21 nt, synthetic construct
  source 1..21: mol_type = other RNA
  modified_base 1: mod_base = OTHER; note = 2'-O-methyladenosine with a 3'-phosphorothioate linkage and a 5' inverted abasic moiety connected via a 5' to 5' phosphorothioate linkage
  modified_base 2: mod_base = um
  modified_base 3: mod_base = gm
  modified_base 4: mod_base = OTHER; note = 2'-O-methyladenosine
  modified_base 5: mod_base = um
  modified_base 6: mod_base = um
  modified_base 7: mod_base = gm
  modified_base 8: mod_base = um
  modified_base 9: mod_base = OTHER; note = 2'-fluoroguanosine
  modified_base 10: mod_base = OTHER; note = 2'-fluoroadenosine
  modified_base 11: mod_base = OTHER; note = 2'-fluoroadenosine
  modified_base 12: mod_base = um
  modified_base 13: mod_base = OTHER; note = 2'-O-methyladenosine
  modified_base 14: mod_base = um
  modified_base 15: mod_base = cm
  modified_base 16: mod_base = um
  modified_base 17: mod_base = um
  modified_base 18: mod_base = um
  modified_base 19: mod_base = OTHER; note = 2'-O-methylguanosine with a 3'-phosphorothioate linkage
  modified_base 20: mod_base = OTHER; note = 2'-O-methyladenosine with a 3'-phosphorothioate linkage
  modified_base 21: mod_base = OTHER; note = 2'-O-methyladenosine
atgattgtgaatatctttgaa

SEQ ID NO: 587 - RNA, 21 nt, synthetic construct
  source 1..21: mol_type = other RNA
  modified_base 1: mod_base = OTHER; note = 2'-O-methylguanosine with a 3'-phosphorothioate linkage and a 5' inverted abasic moiety connected via a 5' to 5' phosphorothioate linkage
  modified_base 2: mod_base = gm
  modified_base 3: mod_base = cm
  modified_base 4: mod_base = um
  modified_base 5: mod_base = cm
  modified_base 6: mod_base = cm
  modified_base 7: mod_base = um
  modified_base 8: mod_base = gm
  modified_base 9: mod_base = OTHER; note = 2'-fluoroadenosine
  modified_base 10: mod_base = OTHER; note = 2'-fluoroadenosine
  modified_base 11: mod_base = OTHER; note = 2'-fluoroadenosine
  modified_base 12: mod_base = um
  modified_base 13: mod_base = gm
  modified_base 14: mod_base = cm
  modified_base 15: mod_base = cm
  modified_base 16: mod_base = um
  modified_base 17: mod_base = gm
  modified_base 18: mod_base = OTHER; note = 2'-O-methyladenosine
  modified_base 19: mod_base = OTHER; note = 2'-O-methyluridine with a 3'-phosphorothioate linkage
  modified_base 20: mod_base = OTHER; note = 2'-O-methylguanosine with a 3'-phosphorothioate linkage
  modified_base 21: mod_base = OTHER; note = 2'-O-methyladenosine
ggctcctgaaatgcctgatga

SEQ ID NO: 588 - RNA, 21 nt, synthetic construct
  source 1..21: mol_type = other RNA
  modified_base 1: mod_base = OTHER; note = 2'-O-methyluridine with a 3'-phosphorothioate linkage and a 5' inverted abasic moiety connected via a 5' to 5' phosphorothioate linkage
  modified_base 2: mod_base = OTHER; note = 2'-O-methyladenosine
  modified_base 3: mod_base = um
  modified_base 4: mod_base = gm
  modified_base 5: mod_base = um
  modified_base 6: mod_base = um
  modified_base 7: mod_base = OTHER; note = 2'-O-methyladenosine
  modified_base 8: mod_base = OTHER; note = 2'-O-methyladenosine
  modified_base 9: mod_base = OTHER; note = 2'-fluoroadenosine
  modified_base 10: mod_base = OTHER; note = 2'-fluoroadenosine
  modified_base 11: mod_base = OTHER; note = 2'-fluoroadenosine
  modified_base 12: mod_base = gm
  modified_base 13: mod_base = OTHER; note = 2'-O-methyladenosine
  modified_base 14: mod_base = OTHER; note = 2'-O-methyladenosine
  modified_base 15: mod_base = OTHER; note = 2'-O-methyladenosine
  modified_base 16: mod_base = um
  modified_base 17: mod_base = cm
  modified_base 18: mod_base = um
  modified_base 19: mod_base = OTHER; note = 2'-O-methylcytidine with a 3'-phosphorothioate linkage
  modified_base 20: mod_base = OTHER; note = 2'-O-methyluridine with a 3'-phosphorothioate linkage
  modified_base 21: mod_base = OTHER; note = 2'-O-methyladenosine
tatgttaaaaagaaatctcta

SEQ ID NO: 589 - RNA, 21 nt, synthetic construct
  source 1..21: mol_type = other RNA
  modified_base 1: mod_base = OTHER; note = 2'-O-methylcytidine with a 3'-phosphorothioate linkage
  modified_base 2: mod_base = OTHER; note = 2'-O-methyladenosine with a 3'-phosphorothioate linkage
  modified_base 3: mod_base = um
  modified_base 4: mod_base = OTHER; note = 2'-O-methyladenosine
  modified_base 5: mod_base = gm
  modified_base 6: mod_base = cm
  modified_base 7: mod_base = um
  modified_base 8: mod_base = um
  modified_base 9: mod_base = OTHER; note = 2'-fluorouridine
  modified_base 10: mod_base = OTHER; note = 2'-fluorocytidine
  modified_base 11: mod_base = OTHER; note = 2'-fluorouridine
  modified_base 12: mod_base = um
  modified_base 13: mod_base = um
  modified_base 14: mod_base = um
  modified_base 15: mod_base = cm
  modified_base 16: mod_base = cm
  modified_base 17: mod_base = OTHER; note = 2'-O-methyladenosine
  modified_base 18: mod_base = um
  modified_base 19: mod_base = OTHER; note = 2'-O-methyluridine with a 3'-phosphorothioate linkage
  modified_base 20: mod_base = OTHER; note = 2'-O-methyluridine with a 3'-phosphorothioate linkage
  modified_base 21: mod_base = OTHER; note = 2'-O-methyladenosine
catagctttcttttccattta

SEQ ID NO: 590 - RNA, 21 nt, synthetic construct
  source 1..21: mol_type = other RNA
  modified_base 1: mod_base = OTHER; note = 2'-O-methylcytidine with a 3'-phosphorothioate linkage and a 5' inverted abasic moiety connected via a 5' to 5' phosphorothioate linkage
  modified_base 2: mod_base = OTHER; note = 2'-O-methyladenosine
  modified_base 3: mod_base = um
  modified_base 4: mod_base = OTHER; note = 2'-O-methyladenosine
  modified_base 5: mod_base = gm
  modified_base 6: mod_base = cm
  modified_base 7: mod_base = um
  modified_base 8: mod_base = um
  modified_base 9: mod_base = OTHER; note = 2'-fluorouridine
  modified_base 10: mod_base = OTHER; note = 2'-fluorocytidine
  modified_base 11: mod_base = OTHER; note = 2'-fluorouridine
  modified_base 12: mod_base = um
  modified_base 13: mod_base = um
  modified_base 14: mod_base = um
  modified_base 15: mod_base = cm
  modified_base 16: mod_base = cm
  modified_base 17: mod_base = OTHER; note = 2'-O-methyladenosine
  modified_base 18: mod_base = um
  modified_base 19: mod_base = OTHER; note = 2'-O-methyluridine with a 3'-phosphorothioate linkage
  modified_base 20: mod_base = OTHER; note = 2'-O-methyluridine with a 3'-phosphorothioate linkage
  modified_base 21: mod_base = OTHER; note = 2'-O-methyladenosine
catagctttcttttccattta

SEQ ID NO: 591 - RNA, 21 nt, synthetic construct
  source 1..21: mol_type = other RNA
  modified_base 1: mod_base = OTHER; note = 2'-O-methyluridine with a 3'-phosphorothioate linkage and a 5' inverted abasic moiety connected via a 5' to 5' phosphorothioate linkage
  modified_base 2: mod_base = um
  modified_base 3: mod_base = gm
  modified_base 4: mod_base = OTHER; note = 2'-O-methyladenosine
  modified_base 5: mod_base = um
  modified_base 6: mod_base = gm
  modified_base 7: mod_base = OTHER; note = 2'-O-methyladenosine
  modified_base 8: mod_base = um
  modified_base 9: mod_base = OTHER; note = 2'-fluoroadenosine
  modified_base 10: mod_base = OTHER; note = 2'-fluorocytidine
  modified_base 11: mod_base = OTHER; note = 2'-fluoroadenosine
  modified_base 12: mod_base = OTHER; note = 2'-O-methyladenosine
  modified_base 13: mod_base = um
  modified_base 14: mod_base = gm
  modified_base 15: mod_base = cm
  modified_base 16: mod_base = OTHER; note = 2'-O-methyladenosine
  modified_base 17: mod_base = um
  modified_base 18: mod_base = gm
  modified_base 19: mod_base = OTHER; note = 2'-O-methyluridine with a 3'-phosphorothioate linkage
  modified_base 20: mod_base = OTHER; note = 2'-O-methylguanosine with a 3'-phosphorothioate linkage
  modified_base 21: mod_base = OTHER; note = 2'-O-methyladenosine
ttgatgatacaatgcatgtga

SEQ ID NO: 592 - RNA, 21 nt, synthetic construct
  source 1..21: mol_type = other RNA
  modified_base 1: mod_base = OTHER; note = 2'-O-methyluridine with a 3'-phosphorothioate linkage and a 5' inverted abasic moiety connected via a 5' to 5' phosphorothioate linkage
  modified_base 2: mod_base = um
  modified_base 3: mod_base = cm
  modified_base 4: mod_base = OTHER; note = 2'-O-methyladenosine
  modified_base 5: mod_base = OTHER; note = 2'-O-methyladenosine
  modified_base 6: mod_base = OTHER; note = 2'-O-methyladenosine
  modified_base 7: mod_base = cm
  modified_base 8: mod_base = gm
  modified_base 9: mod_base = OTHER; note = 2'-fluoroadenosine
  modified_base 10: mod_base = OTHER; note = 2'-fluoroguanosine
  modified_base 11: mod_base = OTHER; note = 2'-fluorocytidine
  modified_base 12: mod_base = um
  modified_base 13: mod_base = gm
  modified_base 14: mod_base = OTHER; note = 2'-O-methyladenosine
  modified_base 15: mod_base = gm
  modified_base 16: mod_base = OTHER; note = 2'-O-methyladenosine
  modified_base 17: mod_base = um
  modified_base 18: mod_base = cm
  modified_base 19: mod_base = OTHER; note = 2'-O-methyluridine with a 3'-phosphorothioate linkage
  modified_base 20: mod_base = OTHER; note = 2'-O-methyladenosine with a 3'-phosphorothioate linkage
  modified_base 21: mod_base = OTHER; note = 2'-O-methyladenosine
ttcaaacgagctgagatctaa

SEQ ID NO: 593 - RNA, 21 nt, synthetic construct
  source 1..21: mol_type = other RNA
  modified_base 1: mod_base = OTHER; note = 2'-O-methyluridine with a 3'-phosphorothioate linkage and a 5' inverted abasic moiety connected via a 5' to 5' phosphorothioate linkage
  modified_base 2: mod_base = um
  modified_base 3: mod_base = cm
  modified_base 4: mod_base = OTHER; note = 2'-O-methyladenosine
  modified_base 5: mod_base = um
  modified_base 6: mod_base = OTHER; note = 2'-O-methyladenosine
  modified_base 7: mod_base = cm
  modified_base 8: mod_base = gm
  modified_base 9: mod_base = OTHER; note = 2'-fluoroadenosine
  modified_base 10: mod_base = OTHER; note = 2'-fluoroguanosine
  modified_base 11: mod_base = OTHER; note = 2'-fluorocytidine
  modified_base 12: mod_base = um
  modified_base 13: mod_base = gm
  modified_base 14: mod_base = OTHER; note = 2'-O-methyladenosine
  modified_base 15: mod_base = cm
  modified_base 16: mod_base = OTHER; note = 2'-O-methyladenosine
  modified_base 17: mod_base = um
  modified_base 18: mod_base = cm
  modified_base 19: mod_base = OTHER; note = 2'-O-methyluridine with a 3'-phosphorothioate linkage
  modified_base 20: mod_base = OTHER; note = 2'-O-methyladenosine with a 3'-phosphorothioate linkage
  modified_base 21: mod_base = OTHER; note = 2'-O-methyladenosine
ttcatacgagctgacatctaa

SEQ ID NO: 594 - RNA, 19 nt, synthetic construct
  source 1..19: mol_type = other RNA
  modified_base 1: mod_base = OTHER; note = 2'-O-methyladenosine with a 3'-phosphorothioate linkage and a 5' inverted abasic moiety connected via a 5' to 5' phosphorothioate linkage
  modified_base 2: mod_base = um
  modified_base 3: mod_base = cm
  modified_base 4: mod_base = um
  modified_base 5: mod_base = cm
  modified_base 6: mod_base = OTHER; note = 2'-O-methyladenosine
  modified_base 7: mod_base = OTHER; note = 2'-fluoroadenosine
  modified_base 8: mod_base = OTHER; note = 2'-fluorocytidine
  modified_base 9: mod_base = OTHER; note = 2'-fluorouridine
  modified_base 10: mod_base = um
  modified_base 11: mod_base = um
  modified_base 12: mod_base = gm
  modified_base 13: mod_base = um
  modified_base 14: mod_base = gm
  modified_base 15: mod_base = um
  modified_base 16: mod_base = cm
  modified_base 17: mod_base = OTHER; note = 2'-O-methyladenosine with a 3'-phosphorothioate linkage
  modified_base 18: mod_base = OTHER; note = 2'-O-methyladenosine with a 3'-phosphorothioate linkage
  modified_base 19: mod_base = OTHER; note = 2'-O-methyladenosine
atctcaactttgtgtcaaa

SEQ ID NO: 595 - RNA, 20 nt, synthetic construct
  source 1..20: mol_type = other RNA
  modified_base 1: mod_base = OTHER; note = 2'-O-methyluridine with a 3'-phosphorothioate linkage and a 5' inverted abasic moiety connected via a 5' to 5' phosphorothioate linkage
  modified_base 2: mod_base = OTHER; note = 2'-O-methyladenosine
  modified_base 3: mod_base = um
  modified_base 4: mod_base = cm
  modified_base 5: mod_base = um
  modified_base 6: mod_base = cm
  modified_base 7: mod_base = OTHER; note = 2'-O-methyladenosine
  modified_base 8: mod_base = OTHER; note = 2'-fluoroadenosine
  modified_base 9: mod_base = OTHER; note = 2'-fluorocytidine
  modified_base 10: mod_base = OTHER; note = 2'-fluorouridine
  modified_base 11: mod_base = um
  modified_base 12: mod_base = um
  modified_base 13: mod_base = gm
  modified_base 14: mod_base = um
  modified_base 15: mod_base = gm
  modified_base 16: mod_base = um
  modified_base 17: mod_base = cm
  modified_base 18: mod_base = OTHER; note = 2'-O-methyladenosine with a 3'-phosphorothioate linkage
  modified_base 19: mod_base = OTHER; note = 2'-O-methyladenosine with a 3'-phosphorothioate linkage
  modified_base 20: mod_base = OTHER; note = 2'-O-methyladenosine
tatctcaactttgtgtcaaa

SEQ ID NO: 596 - RNA, 22 nt, synthetic construct
  source 1..22: mol_type = other RNA
  modified_base 1: mod_base = OTHER; note = 2'-O-methyluridine with a 3'-phosphorothioate linkage and a 5' inverted abasic moiety connected via a 5' to 5' phosphorothioate linkage
  modified_base 2: mod_base = OTHER; note = 2'-O-methyladenosine
  modified_base 3: mod_base = um
  modified_base 4: mod_base = OTHER; note = 2'-O-methyladenosine
  modified_base 5: mod_base = um
  modified_base 6: mod_base = cm
  modified_base 7: mod_base = um
  modified_base 8: mod_base = cm
  modified_base 9: mod_base = OTHER; note = 2'-O-methyladenosine
  modified_base 10: mod_base = OTHER; note = 2'-fluoroadenosine
  modified_base 11: mod_base = OTHER; note = 2'-fluorocytidine
  modified_base 12: mod_base = OTHER; note = 2'-fluorouridine
  modified_base 13: mod_base = um
  modified_base 14: mod_base = um
  modified_base 15: mod_base = gm
  modified_base 16: mod_base = um
  modified_base 17: mod_base = gm
  modified_base 18: mod_base = um
  modified_base 19: mod_base = cm
  modified_base 20: mod_base = OTHER; note = 2'-O-methyladenosine with a 3'-phosphorothioate linkage
  modified_base 21: mod_base = OTHER; note = 2'-O-methyladenosine with a 3'-phosphorothioate linkage
  modified_base 22: mod_base = OTHER; note = 2'-O-methyladenosine
tatatctcaactttgtgtcaaa

SEQ ID NO: 597 - RNA, 23 nt, synthetic construct
  source 1..23: mol_type = other RNA
  modified_base 1: mod_base = OTHER; note = 2'-O-methylcytidine with a 3'-phosphorothioate linkage and a 5' inverted abasic moiety connected via a 5' to 5' phosphorothioate linkage
  modified_base 2: mod_base = um
  modified_base 3: mod_base = OTHER; note = 2'-O-methyladenosine
  modified_base 4: mod_base = um
  modified_base 5: mod_base = OTHER; note = 2'-O-methyladenosine
  modified_base 6: mod_base = um
  modified_base 7: mod_base = cm
  modified_base 8: mod_base = um
  modified_base 9: mod_base = cm
  modified_base 10: mod_base = OTHER; note = 2'-O-methyladenosine
  modified_base 11: mod_base = OTHER; note = 2'-fluoroadenosine
  modified_base 12: mod_base = OTHER; note = 2'-fluorocytidine
  modified_base 13: mod_base = OTHER; note = 2'-fluorouridine
  modified_base 14: mod_base = um
  modified_base 15: mod_base = um
  modified_base 16: mod_base = gm
  modified_base 17: mod_base = um
  modified_base 18: mod_base = gm
  modified_base 19: mod_base = um
  modified_base 20: mod_base = cm
  modified_base 21: mod_base = OTHER; note = 2'-O-methyladenosine with a 3'-phosphorothioate linkage
  modified_base 22: mod_base = OTHER; note = 2'-O-methyladenosine with a 3'-phosphorothioate linkage
  modified_base 23: mod_base = OTHER; note = 2'-O-methyladenosine
ctatatctcaactttgtgtcaaa

SEQ ID NO: 598 - RNA, 21 nt, synthetic construct
  source 1..21: mol_type = other RNA
  modified_base 1: mod_base = OTHER; note = 2'-O-methyladenosine with a 3'-phosphorothioate linkage and a 5' inverted abasic moiety connected via a 5' to 5' phosphorothioate linkage
  modified_base 2: mod_base = OTHER; note = 2'-O-methyladenosine
  modified_base 3: mod_base = um
  modified_base 4: mod_base = cm
  modified_base 5: mod_base = OTHER; note = 2'-O-methyladenosine
  modified_base 6: mod_base = OTHER; note = 2'-O-methyladenosine
  modified_base 7: mod_base = OTHER; note = 2'-O-methyladenosine
  modified_base 8: mod_base = gm
  modified_base 9: mod_base = OTHER; note = 2'-fluoroadenosine
  modified_base 10: mod_base = OTHER; note = 2'-fluoroadenosine
  modified_base 11: mod_base = OTHER; note = 2'-fluorouridine
  modified_base 12: mod_base = OTHER; note = 2'-O-methyladenosine
  modified_base 13: mod_base = um
  modified_base 14: mod_base = cm
  modified_base 15: mod_base = um
  modified_base 16: mod_base = um
  modified_base 17: mod_base = OTHER; note = 2'-O-methyladenosine
  modified_base 18: mod_base = gm
  modified_base 19: mod_base = OTHER; note = 2'-O-methyluridine with a 3'-phosphorothioate linkage
  modified_base 20: mod_base = OTHER; note = 2'-O-methylguanosine with a 3'-phosphorothioate linkage
  modified_base 21: mod_base = OTHER; note = 2'-O-methyladenosine
aatcaaagaatatcttagtga

SEQ ID NO: 599 - RNA, 23 nt, synthetic construct
  source 1..23: mol_type = other RNA
  modified_base 1: mod_base = OTHER; note = 2'-O-methyluridine with a 3'-phosphorothioate linkage
  modified_base 2: mod_base = OTHER; note = 2'-fluoroadenosine with a 3'-phosphorothioate linkage
  modified_base 3: mod_base = cm
  modified_base 4: mod_base = OTHER; note = 2'-O-methyladenosine
  modified_base 5: mod_base = OTHER; note = 2'-fluorouridine
  modified_base 6: mod_base = um
  modified_base 7: mod_base = OTHER; note = 2'-fluorocytidine
  modified_base 8: mod_base = OTHER; note = 2'-O-methyladenosine
  modified_base 9: mod_base = um
  modified_base 10: mod_base = um
  modified_base 11: mod_base = gm
  modified_base 12: mod_base = um
  modified_base 13: mod_base = OTHER; note = 2'-O-methyladenosine
  modified_base 14: mod_base = OTHER; note = 2'-fluorouridine
  modified_base 15: mod_base = cm
  modified_base 16: mod_base = OTHER; note = 2'-fluoroadenosine
  modified_base 17: mod_base = um
  modified_base 18: mod_base = cm
  modified_base 19: mod_base = OTHER; note = 2'-O-methyladenosine
  modified_base 20: mod_base = OTHER; note = 2'-O-methyladenosine
  modified_base 21: mod_base = OTHER; note = 2'-O-methylguanosine with a 3'-phosphorothioate linkage
  modified_base 22: mod_base = OTHER; note = 2'-O-methylcytidine with a 3'-phosphorothioate linkage
  modified_base 23: mod_base = OTHER; note = 2'-O-methyladenosine
tacattcattgtatcatcaagca

SEQ ID NO: 600 - RNA, 23 nt, synthetic construct
  source 1..23: mol_type = other RNA
  modified_base 1: mod_base = OTHER; note = 2'-O-methyluridine with a 3'-phosphorothioate linkage
  modified_base 2: mod_base = OTHER; note = 2'-fluoroadenosine with a 3'-phosphorothioate linkage
  modified_base 3: mod_base = um
  modified_base 4: mod_base = um
  modified_base 5: mod_base = OTHER; note = 2'-fluorocytidine
  modified_base 6: mod_base = OTHER; note = 2'-O-methyladenosine
  modified_base 7: mod_base = OTHER; note = 2'-fluorouridine
  modified_base 8: mod_base = um
  modified_base 9: mod_base = gm
  modified_base 10: mod_base = um
  modified_base 11: mod_base = OTHER; note = 2'-O-methyladenosine
  modified_base 12: mod_base = um
  modified_base 13: mod_base = cm
  modified_base 14: mod_base = OTHER; note = 2'-fluoroadenosine
  modified_base 15: mod_base = um
  modified_base 16: mod_base = OTHER; note = 2'-fluorocytidine
  modified_base 17: mod_base = OTHER; note = 2'-O-methyladenosine
  modified_base 18: mod_base = OTHER; note = 2'-O-methyladenosine
  modified_base 19: mod_base = gm
  modified_base 20: mod_base = cm
  modified_base 21: mod_base = OTHER; note = 2'-O-methyladenosine with a 3'-phosphorothioate linkage
  modified_base 22: mod_base = OTHER; note = 2'-O-methyluridine with a 3'-phosphorothioate linkage
  modified_base 23: mod_base = um
tattcattgtatcatcaagcatt

SEQ ID NO: 601 - RNA, 23 nt, synthetic construct
  source 1..23: mol_type = other RNA
  modified_base 1: mod_base = OTHER; note = 2'-O-methyluridine with a 3'-phosphorothioate linkage
  modified_base 2: mod_base = OTHER; note = 2'-fluoroadenosine with a 3'-phosphorothioate linkage
  modified_base 3: mod_base = OTHER; note = 2'-O-methyladenosine
  modified_base 4: mod_base = OTHER; note = 2'-O-methyladenosine
  modified_base 5: mod_base = OTHER; note = 2'-fluorouridine
  modified_base 6: mod_base = OTHER; note = 2'-O-methyladenosine
  modified_base 7: mod_base = OTHER; note = 2'-fluorocytidine
  modified_base 8: mod_base = OTHER; note = 2'-O-methyladenosine
  modified_base 9: mod_base = um
  modified_base 10: mod_base = um
  modified_base 11: mod_base = OTHER; note = 2'-O-methyladenosine
  modified_base 12: mod_base = um
  modified_base 13: mod_base = OTHER; note = 2'-O-methyladenosine
  modified_base 14: mod_base = OTHER; note = 2'-fluorouridine
  modified_base 15: mod_base = gm
  modified_base 16: mod_base = OTHER; note = 2'-fluorocytidine
  modified_base 17: mod_base = um
  modified_base 18: mod_base = OTHER; note = 2'-O-methyladenosine
  modified_base 19: mod_base = OTHER; note = 2'-O-methyladenosine
  modified_base 20: mod_base = cm
  modified_base 21: mod_base = OTHER; note = 2'-O-methyladenosine with a 3'-phosphorothioate linkage
  modified_base 22: mod_base = OTHER; note = 2'-O-methyluridine with a 3'-phosphorothioate linkage
  modified_base 23: mod_base = gm
taaatacattatatgctaacatg

SEQ ID NO: 602 - RNA, 23 nt, synthetic construct
  source 1..23: mol_type = other RNA
  modified_base 1: mod_base = OTHER; note = 2'-O-methyluridine with a 3'-phosphorothioate linkage
  modified_base 2: mod_base = OTHER; note = 2'-fluoroguanosine with a 3'-phosphorothioate linkage
  modified_base 3: mod_base = um
  modified_base 4: mod_base = OTHER; note = 2'-O-methyladenosine
  modified_base 5: mod_base = OTHER; note = 2'-fluoroadenosine
  modified_base 6: mod_base = OTHER; note = 2'-O-methyladenosine
  modified_base 7: mod_base = OTHER; note = 2'-fluoroadenosine
  modified_base 8: mod_base = um
  modified_base 9: mod_base = OTHER; note = 2'-O-methyladenosine
  modified_base 10: mod_base = OTHER; note = 2'-O-methyladenosine
  modified_base 11: mod_base = OTHER; note = 2'-O-methyladenosine
  modified_base 12: mod_base = OTHER; note = 2'-O-methyladenosine
  modified_base 13: mod_base = OTHER; note = 2'-O-methyladenosine
  modified_base 14: mod_base = OTHER; note = 2'-fluorocytidine
  modified_base 15: mod_base = um
  modified_base 16: mod_base = OTHER; note = 2'-fluorouridine
  modified_base 17: mod_base = OTHER; note = 2'-O-methyladenosine
  modified_base 18: mod_base = OTHER; note = 2'-O-methyladenosine
  modified_base 19: mod_base = um
  modified_base 20: mod_base = gm
  modified_base 21: mod_base = OTHER; note = 2'-O-methyladenosine with a 3'-phosphorothioate linkage
  modified_base 22: mod_base = OTHER; note = 2'-O-methylcytidine with a 3'-phosphorothioate linkage
  modified_base 23: mod_base = um
tgtaaaataaaaacttaatgact

SEQ ID NO: 603 - RNA, 23 nt, synthetic construct
  source 1..23: mol_type = other RNA
  modified_base 1: mod_base = OTHER; note = 2'-O-methyluridine with a 3'-phosphorothioate linkage
  modified_base 2: mod_base = OTHER; note = 2'-fluoroadenosine with a 3'-phosphorothioate linkage
  modified_base 3: mod_base = um
  modified_base 4: mod_base = cm
  modified_base 5: mod_base = OTHER; note = 2'-fluoroadenosine
  modified_base 6: mod_base = um
  modified_base 7: mod_base = OTHER; note = 2'-fluorouridine
  modified_base 8: mod_base = OTHER; note = 2'-O-methyladenosine
  modified_base 9: mod_base = gm
  modified_base 10: mod_base = gm
  modified_base 11: mod_base = cm
  modified_base 12: mod_base = um
  modified_base 13: mod_base = um
  modified_base 14: mod_base = OTHER; note = 2'-fluorouridine
  modified_base 15: mod_base = gm
  modified_base 16: mod_base = OTHER; note = 2'-fluorocytidine
  modified_base 17: mod_base = OTHER; note = 2'-O-methyladenosine
  modified_base 18: mod_base = gm
  modified_base 19: mod_base = um
  modified_base 20: mod_base = cm
  modified_base 21: mod_base = OTHER; note = 2'-O-methyluridine with a 3'-phosphorothioate linkage
  modified_base 22: mod_base = OTHER; note = 2'-O-methyluridine with a 3'-phosphorothioate linkage
  modified_base 23: mod_base = cm
tatcattaggctttgcagtcttc

SEQ ID NO: 604 - RNA, 23 nt, synthetic construct
  source 1..23: mol_type = other RNA
  modified_base 1: mod_base = OTHER; note = 2'-O-methyluridine with a 3'-phosphorothioate linkage
  modified_base 2: mod_base = OTHER; note = 2'-fluorouridine with a 3'-phosphorothioate linkage
  modified_base 3: mod_base = um
  modified_base 4: mod_base = um
  modified_base 5: mod_base = OTHER; note = 2'-fluorouridine
  modified_base 6: mod_base = cm
  modified_base 7: mod_base = OTHER; note = 2'-fluoroadenosine
  modified_base 8: mod_base = cm
  modified_base 9: mod_base = OTHER; note = 2'-O-methyladenosine
  modified_base 10: mod_base = gm
  modified_base 11: mod_base = cm
  modified_base 12: mod_base = cm
  modified_base 13: mod_base = OTHER; note = 2'-O-methyladenosine
  modified_base 14: mod_base = OTHER; note = 2'-fluorocytidine
  modified_base 15: mod_base = OTHER; note = 2'-O-methyladenosine
  modified_base 16: mod_base = OTHER; note = 2'-fluorouridine
  modified_base 17: mod_base = cm
  modified_base 18: mod_base = um
  modified_base 19: mod_base = um
  modified_base 20: mod_base = cm
  modified_base 21: mod_base = OTHER; note = 2'-O-methylcytidine with a 3'-phosphorothioate linkage
  modified_base 22: mod_base = OTHER; note = 2'-O-methylcytidine with a 3'-phosphorothioate linkage
  modified_base 23: mod_base = cm
tttttcacagccacatcttcccc

SEQ ID NO: 605 - RNA, 23 nt, synthetic construct
  source 1..23: mol_type = other RNA
  modified_base 1: mod_base = OTHER; note = 2'-O-methyluridine with a 3'-phosphorothioate linkage
  modified_base 2: mod_base = OTHER; note = 2'-fluoroadenosine with a 3'-phosphorothioate linkage
  modified_base 3: mod_base = OTHER; note = 2'-O-methyladenosine
  modified_base 4: mod_base = cm
  modified_base 5: mod_base = OTHER; note = 2'-fluorocytidine
  modified_base 6: mod_base = um
  modified_base 7: mod_base = OTHER; note = 2'-fluorouridine
  modified_base 8: mod_base = um
  modified_base 9: mod_base = cm
  modified_base 10: mod_base = um
  modified_base 11: mod_base = cm
  modified_base 12: mod_base = OTHER; note = 2'-O-methyladenosine
  modified_base 13: mod_base = um
  modified_base 14: mod_base = OTHER; note = 2'-fluorouridine
  modified_base 15: mod_base = um
  modified_base 16: mod_base = OTHER; note = 2'-fluorocytidine
  modified_base 17: mod_base = cm
  modified_base 18: mod_base = um
  modified_base 19: mod_base = cm
  modified_base 20: mod_base = um
  modified_base 21: mod_base = OTHER; note = 2'-O-methyladenosine with a 3'-phosphorothioate linkage
  modified_base 22: mod_base = OTHER; note = 2'-O-methyluridine with a 3'-phosphorothioate linkage
  modified_base 23: mod_base = cm
taacctttctcatttcctctatc

SEQ ID NO: 606 - RNA, 23 nt, synthetic construct
  source 1..23: mol_type = other RNA
  modified_base 1: mod_base = OTHER; note = 2'-O-methyluridine with a 3'-phosphorothioate linkage
  modified_base 2: mod_base = OTHER; note = 2'-fluoroguanosine with a 3'-phosphorothioate linkage
  modified_base 3: mod_base = OTHER; note = 2'-O-methyladenosine
  modified_base 4: mod_base = OTHER; note = 2'-O-methyladenosine
  modified_base 5: mod_base = OTHER; note = 2'-fluoroadenosine
  modified_base 6: mod_base = cm
  modified_base 7: mod_base = OTHER; note = 2'-fluoroadenosine
  modified_base 8: mod_base = um
  modified_base 9: mod_base = OTHER; note = 2'-O-methyladenosine
  modified_base 10: mod_base = gm
  modified_base 11: mod_base = OTHER; note = 2'-O-methyladenosine
  modified_base 12: mod_base = um
  modified_base 13: mod_base = um
  modified_base 14: mod_base = OTHER; note = 2'-fluoroguanosine
  modified_base 15: mod_base = cm
  modified_base 16: mod_base = OTHER; note = 2'-fluoroadenosine
  modified_base 17: mod_base = um
  modified_base 18: mod_base = cm
  modified_base 19: mod_base = OTHER; note = 2'-O-methyladenosine
  modified_base 20: mod_base = cm
  modified_base 21: mod_base = OTHER; note = 2'-O-methylcytidine with a 3'-phosphorothioate linkage
  modified_base 22: mod_base = OTHER; note = 2'-O-methyluridine with a 3'-phosphorothioate linkage
  modified_base 23: mod_base = OTHER; note = 2'-O-methyladenosine
tgaaacatagattgcatcaccta

SEQ ID NO: 607 - RNA, 23 nt, synthetic construct
  source 1..23: mol_type = other RNA
  modified_base 1: mod_base = OTHER; note = 2'-O-methyluridine with a 3'-phosphorothioate linkage
  modified_base 2: mod_base = OTHER; note = 2'-fluoroguanosine with a 3'-phosphorothioate linkage
  modified_base 3: mod_base = um
  modified_base 4: mod_base = cm
  modified_base 5: mod_base = OTHER; note = 2'-fluorouridine
  modified_base 6: mod_base = um
  modified_base 7: mod_base = OTHER; note = 2'-fluoroadenosine
  modified_base 8: mod_base = um
  modified_base 9: mod_base = cm
  modified_base 10: mod_base = um
  modified_base 11: mod_base = um
  modified_base 12: mod_base = um
  modified_base 13: mod_base = gm
  modified_base 14: mod_base = OTHER; note = 2'-fluoroadenosine
  modified_base 15: mod_base = gm
  modified_base 16: mod_base = OTHER; note = 2'-fluoroguanosine
  modified_base 17: mod_base = um
  modified_base 18: mod_base = OTHER; note = 2'-O-methyladenosine
  modified_base 19: mod_base = gm
  modified_base 20: mod_base = OTHER; note = 2'-O-methyladenosine
  modified_base 21: mod_base = OTHER; note = 2'-O-methyladenosine with a 3'-phosphorothioate linkage
  modified_base 22: mod_base = OTHER; note = 2'-O-methylcytidine with a 3'-phosphorothioate linkage
  modified_base 23: mod_base = OTHER; note = 2'-O-methyladenosine
tgtcttatctttgaggtagaaca

SEQ ID NO: 608 - RNA, 23 nt, synthetic construct
  source 1..23: mol_type = other RNA
  modified_base 1: mod_base = OTHER; note = 2'-O-methyluridine with a 3'-phosphorothioate linkage
  modified_base 2: mod_base = OTHER; note = 2'-fluorocytidine with a 3'-phosphorothioate linkage
  modified_base 3: mod_base = um
  modified_base 4: mod_base = um
  modified_base 5: mod_base = OTHER; note = 2'-fluoroadenosine
  modified_base 6: mod_base = OTHER; note = 2'-O-methyladenosine
  modified_base 7: mod_base = OTHER; note = 2'-fluorouridine
  modified_base 8: mod_base = OTHER; note = 2'-O-methyladenosine
  modified_base 9: mod_base = cm
  modified_base 10: mod_base = gm
  modified_base 11: mod_base = OTHER; note = 2'-O-methyladenosine
  modified_base 12: mod_base = OTHER; note = 2'-O-methyladenosine
  modified_base 13: mod_base = gm
  modified_base 14: mod_base = OTHER; note = 2'-fluoroadenosine
  modified_base 15: mod_base = gm
  modified_base 16: mod_base = OTHER; note = 2'-fluorocytidine
  modified_base 17: mod_base = OTHER; note = 2'-O-methyladenosine
  modified_base 18: mod_base = gm
  modified_base 19: mod_base = um
  modified_base 20: mod_base = um
  modified_base 21: mod_base = OTHER; note = 2'-O-methyladenosine with a 3'-phosphorothioate linkage
  modified_base 22: mod_base = OTHER; note = 2'-O-methylguanosine with a 3'-phosphorothioate linkage
  modified_base 23: mod_base = gm
tcttaatacgaagagcagttagg

SEQ ID NO: 609 - RNA, 23 nt, synthetic construct
  source 1..23: mol_type = other RNA
  modified_base 1: mod_base = OTHER; note = 2'-O-methyluridine with a 3'-phosphorothioate linkage
  modified_base 2: mod_base = OTHER; note = 2'-fluoroguanosine with a 3'-phosphorothioate linkage
  modified_base 3: mod_base = OTHER; note = 2'-O-methyladenosine
  modified_base 4: mod_base = gm
  modified_base 5: mod_base = OTHER; note = 2'-fluorocytidine
  modified_base 6: mod_base = OTHER; note = 2'-O-methyladenosine
  modified_base 7: mod_base = OTHER; note = 2'-fluoroadenosine
  modified_base 8: mod_base = um
  modified_base 9: mod_base = OTHER; note = 2'-O-methyladenosine
  modified_base 10: mod_base = gm
  modified_base 11: mod_base = cm
  modified_base 12: mod_base = OTHER; note = 2'-O-methyladenosine
  modified_base 13: mod_base = gm
  modified_base 14: mod_base = OTHER; note = 2'-fluoroguanosine
  modified_base 15: mod_base = um
  modified_base 16: mod_base = OTHER; note = 2'-fluorouridine
  modified_base 17: mod_base = um
  modified_base 18: mod_base = OTHER; note = 2'-O-methyladenosine
  modified_base 19: mod_base = cm
  modified_base 20: mod_base = cm
  modified_base 21: mod_base = OTHER; note = 2'-O-methyluridine with a 3'-phosphorothioate linkage
  modified_base 22: mod_base = OTHER; note = 2'-O-methyluridine with a 3'-phosphorothioate linkage
  modified_base 23: mod_base = gm
tgagcaatagcaggtttaccttg

SEQ ID NO: 610 - RNA, 23 nt, synthetic construct
  source 1..23: mol_type = other RNA
  modified_base 1: mod_base = OTHER; note = 2'-O-methyluridine with a 3'-phosphorothioate linkage
  modified_base 2: mod_base = OTHER; note = 2'-fluorocytidine with a 3'-phosphorothioate linkage
  modified_base 3: mod_base = OTHER; note = 2'-O-methyladenosine
  modified_base 4: mod_base = um
  modified_base 5: mod_base = OTHER; note = 2'-fluoroadenosine
  modified_base 6: mod_base = OTHER; note = 2'-O-methyladenosine
  modified_base 7: mod_base = OTHER; note = 2'-fluoroadenosine
  modified_base 8: mod_base = gm
  modified_base 9: mod_base = gm
  modified_base 10: mod_base = gm
  modified_base 11: mod_base = gm
  modified_base 12: mod_base = OTHER; note = 2'-O-methyladenosine
  modified_base 13: mod_base = OTHER; note = 2'-O-methyladenosine
  modified_base 14: mod_base = OTHER; note = 2'-fluoroadenosine
  modified_base 15: mod_base = OTHER; note = 2'-O-methyladenosine
  modified_base 16: mod_base = OTHER; note = 2'-fluorouridine
  modified_base 17: mod_base = gm
  modified_base 18: mod_base = gm
  modified_base 19: mod_base = OTHER; note = 2'-O-methyladenosine
  modified_base 20: mod_base = OTHER; note = 2'-O-methyladenosine
  modified_base 21: mod_base = OTHER; note = 2'-O-methyladenosine with a 3'-phosphorothioate linkage
  modified_base 22: mod_base = OTHER; note = 2'-O-methyladenosine with a 3'-phosphorothioate linkage
  modified_base 23: mod_base = gm
tcataaaggggaaaatggaaaag

SEQ ID NO: 611 - RNA, 23 nt, synthetic construct
  source 1..23: mol_type = other RNA
  modified_base 1: mod_base = OTHER; note = 2'-O-methyluridine with a 3'-phosphorothioate linkage
  modified_base 2: mod_base = OTHER; note = 2'-fluorocytidine with a 3'-phosphorothioate linkage
  modified_base 3: mod_base = OTHER; note = 2'-O-methyladenosine
  modified_base 4: mod_base = um
  modified_base 5: mod_base = OTHER; note = 2'-fluoroguanosine
  modified_base 6: mod_base = OTHER; note = 2'-O-methyladenosine
  modified_base 7: mod_base = OTHER; note = 2'-fluorouridine
  modified_base 8: mod_base = OTHER; note = 2'-O-methyladenosine
  modified_base 9: mod_base = um
  modified_base 10: mod_base = um
  modified_base 11: mod_base = cm
  modified_base 12: mod_base = OTHER; note = 2'-O-methyladenosine
  modified_base 13: mod_base = gm
  modified_base 14: mod_base = OTHER; note = 2'-fluoroadenosine
  modified_base 15: mod_base = um
  modified_base 16: mod_base = OTHER; note = 2'-fluoroadenosine
  modified_base 17: mod_base = cm
  modified_base 18: mod_base = cm
  modified_base 19: mod_base = OTHER; note = 2'-O-methyladenosine
  modified_base 20: mod_base = gm
  modified_base 21: mod_base = OTHER; note = 2'-O-methylcytidine with a 3'-phosphorothioate linkage
  modified_base 22: mod_base = OTHER; note = 2'-O-methylcytidine with a 3'-phosphorothioate linkage
  modified_base 23: mod_base = OTHER; note = 2'-O-methyladenosine
tcatgatattcagataccagcca

SEQ ID NO: 612 - RNA, 23 nt, synthetic construct
  source 1..23: mol_type = other RNA
  modified_base 1: mod_base = OTHER; note = 2'-O-methyluridine with a 3'-phosphorothioate linkage
  modified_base 2: mod_base = OTHER; note = 2'-fluorouridine with a 3'-phosphorothioate linkage
  modified_base 3: mod_base = um
  modified_base 4: mod_base = OTHER; note = 2'-O-methyladenosine
  modified_base 5: mod_base = OTHER; note = 2'-fluorouridine
  modified_base 6: mod_base = OTHER; note = 2'-O-methyladenosine
  modified_base 7: mod_base = OTHER; note = 2'-fluorocytidine
  modified_base 8: mod_base = um
  modified_base 9: mod_base = um
  modified_base 10: mod_base = um
  modified_base 11: mod_base = um
  modified_base 12: mod_base = gm
  modified_base 13: mod_base = um
  modified_base 14: mod_base = OTHER; note = 2'-fluoroadenosine
  modified_base 15: mod_base = OTHER; note = 2'-O-methyladenosine
  modified_base 16: mod_base = OTHER; note = 2'-fluorouridine
  modified_base 17: mod_base = OTHER; note = 2'-O-methyladenosine
  modified_base 18: mod_base = um
  modified_base 19: mod_base = OTHER; note = 2'-O-methyladenosine
  modified_base 20: mod_base = um
  modified_base 21: mod_base = OTHER; note = 2'-O-methyluridine with a 3'-phosphorothioate linkage
  modified_base 22: mod_base = OTHER; note = 2'-O-methyluridine with a 3'-phosphorothioate linkage
  modified_base 23: mod_base = cm
tttatacttttgtaatatatttc

SEQ ID NO: 613 - RNA, 23 nt, synthetic construct
  source 1..23: mol_type = other RNA
  modified_base 1: mod_base = OTHER; note = 2'-O-methyluridine with a 3'-phosphorothioate linkage
  modified_base 2: mod_base = OTHER; note = 2'-fluoroadenosine with a 3'-phosphorothioate linkage
  modified_base 3: mod_base = gm
  modified_base 4: mod_base = OTHER; note = 2'-O-methyladenosine
  modified_base 5: mod_base = OTHER; note = 2'-fluorouridine
  modified_base 6: mod_base = um
  modified_base 7: mod_base = OTHER; note = 2'-fluorouridine
  modified_base 8: mod_base = cm
  modified_base 9: mod_base = um
  modified_base 10: mod_base = um
  modified_base 11: mod_base = um
  modified_base 12: mod_base = um
  modified_base 13: mod_base = um
  modified_base 14: mod_base = OTHER; note = 2'-fluoroadenosine
  modified_base 15: mod_base = OTHER; note = 2'-O-methyladenosine
  modified_base 16: mod_base = OTHER; note = 2'-fluorocytidine
  modified_base 17: mod_base = OTHER; note = 2'-O-methyladenosine
  modified_base 18: mod_base = um
  modified_base 19: mod_base = OTHER; note = 2'-O-methyladenosine
  modified_base 20: mod_base = OTHER; note = 2'-O-methyladenosine
  modified_base 21: mod_base = OTHER; note = 2'-O-methyluridine with a 3'-phosphorothioate linkage
  modified_base 22: mod_base = OTHER; note = 2'-O-methyluridine with a 3'-phosphorothioate linkage
  modified_base 23: mod_base = OTHER; note = 2'-O-methyladenosine
tagatttctttttaacataatta

SEQ ID NO: 614 - RNA, 23 nt, synthetic construct
  source 1..23: mol_type = other RNA
  modified_base 1: mod_base = OTHER; note = 2'-O-methyluridine with a 3'-phosphorothioate linkage
  modified_base 2: mod_base = OTHER; note = 2'-fluoroadenosine with a 3'-phosphorothioate linkage
  modified_base 3: mod_base = cm
  modified_base 4: mod_base = OTHER; note = 2'-O-methyladenosine
  modified_base 5: mod_base = OTHER; note = 2'-fluorocytidine
  modified_base 6: mod_base = OTHER; note = 2'-O-methyladenosine
  modified_base 7: mod_base = OTHER; note = 2'-fluoroadenosine
  modified_base 8: mod_base = OTHER; note = 2'-O-methyladenosine
  modified_base 9: mod_base = gm
  modified_base 10: mod_base = um
  modified_base 11: mod_base = um
  modified_base 12: mod_base = gm
  modified_base 13: mod_base = OTHER; note = 2'-O-methyladenosine
  modified_base 14: mod_base = OTHER; note = 2'-fluoroguanosine
  modified_base 15: mod_base = OTHER; note = 2'-O-methyladenosine
  modified_base 16: mod_base = OTHER; note = 2'-fluorouridine
  modified_base 17: mod_base = OTHER; note = 2'-O-methyladenosine
  modified_base 18: mod_base = um
  modified_base 19: mod_base = OTHER; note = 2'-O-methyladenosine
  modified_base 20: mod_base = gm
  modified_base 21: mod_base = OTHER; note = 2'-O-methyluridine with a 3'-phosphorothioate linkage
  modified_base 22: mod_base = OTHER; note = 2'-O-methylcytidine with a 3'-phosphorothioate linkage
  modified_base 23: mod_base = um
tacacaaagttgagatatagtct

SEQ ID NO: 615 - RNA, 23 nt, synthetic construct
  source 1..23: mol_type = other RNA
  modified_base 1: mod_base = OTHER; note = 2'-O-methyluridine with a 3'-phosphorothioate linkage
  modified_base 2: mod_base = OTHER; note = 2'-fluoroguanosine with a 3'-phosphorothioate linkage
  modified_base 3: mod_base = OTHER; note = 2'-O-methyladenosine
  modified_base 4: mod_base = um
  modified_base 5: mod_base = OTHER; note = 2'-fluorouridine
  modified_base 6: mod_base = gm
  modified_base 7: mod_base = OTHER; note = 2'-fluoroguanosine
  modified_base 8: mod_base = OTHER; note = 2'-O-methyladenosine
  modified_base 9: mod_base = um
  modified_base 10: mod_base = gm
  modified_base 11: mod_base = OTHER; note = 2'-O-methyladenosine
  modified_base 12: mod_base = OTHER; note = 2'-O-methyladenosine
  modified_base 13: mod_base = gm
  modified_base 14: mod_base = OTHER; note = 2'-fluorouridine
  modified_base 15: mod_base = cm
  modified_base 16: mod_base = OTHER; note = 2'-fluoroadenosine
  modified_base 17: mod_base = OTHER; note = 2'-O-methyladenosine
  modified_base 18: mod_base = cm
  modified_base 19: mod_base = um
  modified_base 20: mod_base = cm
  modified_base 21: mod_base = OTHER; note = 2'-O-methylcytidine with a 3'-phosphorothioate linkage
  modified_base 22: mod_base = OTHER; note = 2'-O-methyluridine with a 3'-phosphorothioate linkage
  modified_base 23: mod_base = gm
tgattggatgaagtcaactcctg

SEQ ID NO: 616 - RNA, 23 nt, synthetic construct
  source 1..23: mol_type = other RNA
  modified_base 1: mod_base = OTHER; note = 2'-O-methyluridine with a 3'-phosphorothioate linkage
  modified_base 2: mod_base = OTHER; note = 2'-fluorouridine with a 3'-phosphorothioate linkage
  modified_base 3: mod_base = um
  modified_base 4: mod_base = um
  modified_base 5: mod_base = OTHER; note = 2'-fluoroadenosine
  modified_base 6: mod_base = gm
  modified_base 7: mod_base = OTHER; note = 2'-fluoroadenosine
  modified_base 8: mod_base = gm
  modified_base 9: mod_base = cm
  modified_base 10: mod_base = OTHER; note = 2'-O-methyladenosine
  modified_base 11: mod_base = OTHER; note = 2'-O-methyladenosine
  modified_base 12: mod_base = um
  modified_base 13: mod_base = OTHER; note = 2'-O-methyladenosine
  modified_base 14: mod_base = OTHER; note = 2'-fluorouridine
  modified_base 15: mod_base = um
  modified_base 16: mod_base = OTHER; note = 2'-fluorouridine
  modified_base 17: mod_base = OTHER; note = 2'-O-methyladenosine
  modified_base 18: mod_base = um
  modified_base 19: mod_base = um
  modified_base 20: mod_base = um
  modified_base 21: mod_base = OTHER; note = 2'-O-methyluridine with a 3'-phosphorothioate linkage
  modified_base 22: mod_base = OTHER; note = 2'-O-methyluridine with a 3'-phosphorothioate linkage
  modified_base 23: mod_base = OTHER; note = 2'-O-methyladenosine
ttttagagcaatatttattttta

SEQ ID NO: 617 - RNA, 23 nt, synthetic construct
  source 1..23: mol_type = other RNA
  modified_base 1: mod_base = OTHER; note = 2'-O-methyluridine with a 3'-phosphorothioate linkage
  modified_base 2: mod_base = OTHER; note = 2'-fluorocytidine with a 3'-phosphorothioate linkage
  modified_base 3: mod_base = OTHER; note = 2'-O-methyladenosine
  modified_base 4: mod_base = um
  modified_base 5: mod_base = OTHER; note = 2'-fluorouridine
  modified_base 6: mod_base = gm
  modified_base 7: mod_base = OTHER; note = 2'-fluorouridine
  modified_base 8: mod_base = um
  modified_base 9: mod_base = gm
  modified_base 10: mod_base = gm
  modified_base 11: mod_base = OTHER; note = 2'-O-methyladenosine
  modified_base 12: mod_base = OTHER; note = 2'-O-methyladenosine
  modified_base 13: mod_base = cm
  modified_base 14: mod_base = OTHER; note = 2'-fluorouridine
  modified_base 15: mod_base = OTHER; note = 2'-O-methyladenosine
  modified_base 16: mod_base = OTHER; note = 2'-fluorouridine
  modified_base 17: mod_base = gm
  modified_base 18: mod_base = OTHER; note = 2'-O-methyladenosine
  modified_base 19: mod_base = cm
  modified_base 20: mod_base = OTHER; note = 2'-O-methyladenosine
  modified_base 21: mod_base = OTHER; note = 2'-O-methylguanosine with a 3'-phosphorothioate linkage
  modified_base 22: mod_base = OTHER; note = 2'-O-methyladenosine with a 3'-phosphorothioate linkage
  modified_base 23: mod_base = OTHER; note = 2'-O-methyladenosine
tcattgttggaactatgacagaa

SEQ ID NO: 618 - RNA, 23 nt, synthetic construct
  source 1..23: mol_type = other RNA
  modified_base 1: mod_base = OTHER; note = 2'-O-methyluridine with a 3'-phosphorothioate linkage
  modified_base 2: mod_base = OTHER; note = 2'-fluorocytidine with a 3'-phosphorothioate linkage
  modified_base 3: mod_base = OTHER; note = 2'-O-methyladenosine
  modified_base 4: mod_base = um
  modified_base 5: mod_base = OTHER; note = 2'-fluoroadenosine
  modified_base 6: mod_base = OTHER; note = 2'-O-methyladenosine
  modified_base 7: mod_base = OTHER; note = 2'-fluorouridine
  modified_base 8: mod_base = um
  modified_base 9: mod_base = OTHER; note = 2'-O-methyladenosine
  modified_base 10: mod_base = um
  modified_base 11: mod_base = cm
  modified_base 12: mod_base = OTHER; note = 2'-O-methyladenosine
  modified_base 13: mod_base = um
  modified_base 14: mod_base = OTHER; note = 2'-fluorocytidine
  modified_base 15: mod_base = OTHER; note = 2'-O-methyladenosine
  modified_base 16: mod_base = OTHER; note = 2'-fluorouridine
  modified_base 17: mod_base = um
  modified_base 18: mod_base = OTHER; note = 2'-O-methyladenosine
  modified_base 19: mod_base = gm
  modified_base 20: mod_base = gm
  modified_base 21: mod_base = OTHER; note = 2'-O-methylcytidine with a 3'-phosphorothioate linkage
  modified_base 22: mod_base = OTHER; note = 2'-O-methyluridine with a 3'-phosphorothioate linkage
  modified_base 23: mod_base = um
tcataattatcatcattaggctt

SEQ ID NO: 619 - RNA, 23 nt, synthetic construct
  source 1..23: mol_type = other RNA
  modified_base 1: mod_base = OTHER; note = 2'-O-methyluridine with a 3'-phosphorothioate linkage
  modified_base 2: mod_base = OTHER; note = 2'-fluoroadenosine with a 3'-phosphorothioate linkage
  modified_base 3: mod_base = um
  modified_base 4: mod_base = gm
  modified_base 5: mod_base = OTHER; note = 2'-fluorocytidine
  modified_base 6: mod_base = um
  modified_base 7: mod_base = OTHER; note = 2'-fluorouridine
  modified_base 8: mod_base = OTHER; note = 2'-O-methyladenosine
  modified_base 9: mod_base = OTHER; note = 2'-O-methyladenosine
  modified_base 10: mod_base = cm
  modified_base 11: mod_base = um
  modified_base 12: mod_base = um
  modified_base 13: mod_base = um
  modified_base 14: mod_base = OTHER; note = 2'-fluoroadenosine
  modified_base 15: mod_base = gm
  modified_base 16: mod_base = OTHER; note = 2'-fluoroadenosine
  modified_base 17: mod_base = gm
  modified_base 18: mod_base = um
  modified_base 19: mod_base = um
  modified_base 20: mod_base = OTHER; note = 2'-O-methyladenosine
  modified_base 21: mod_base = OTHER; note = 2'-O-methyluridine with a 3'-phosphorothioate linkage
  modified_base 22: mod_base = OTHER; note = 2'-O-methylcytidine with a 3'-phosphorothioate linkage
  modified_base 23: mod_base = um
tatgcttaactttagagttatct

SEQ ID NO: 620 - RNA, 23 nt, synthetic construct
  source 1..23: mol_type = other RNA
  modified_base 1: mod_base = OTHER; note = 2'-O-methyluridine with a 3'-phosphorothioate linkage
  modified_base 2: mod_base = OTHER; note = 2'-fluorouridine with a 3'-phosphorothioate linkage
  modified_base 3: mod_base = um
  modified_base 4: mod_base = gm
  modified_base 5: mod_base = OTHER; note = 2'-fluorocytidine
  modified_base 6: mod_base = um
  modified_base 7: mod_base = OTHER; note = 2'-fluorouridine
  modified_base 8: mod_base = um
  modified_base 9: mod_base = cm
  modified_base 10: mod_base = OTHER; note = 2'-O-methyladenosine
  modified_base 11: mod_base = OTHER; note = 2'-O-methyladenosine
  modified_base 12: mod_base = OTHER; note = 2'-O-methyladenosine
  modified_base 13: mod_base = OTHER; note = 2'-O-methyladenosine
  modified_base 14: mod_base = OTHER; note = 2'-fluorouridine
  modified_base 15: mod_base = OTHER; note = 2'-O-methyladenosine
  modified_base 16: mod_base = OTHER; note = 2'-fluoroadenosine
  modified_base 17: mod_base = OTHER; note = 2'-O-methyladenosine
  modified_base 18: mod_base = OTHER; note = 2'-O-methyladenosine
  modified_base 19: mod_base = um
  modified_base 20: mod_base = um
  modified_base 21: mod_base = OTHER; note = 2'-O-methyladenosine with a 3'-phosphorothioate linkage
  modified_base 22: mod_base = OTHER; note = 2'-O-methyladenosine with a 3'-phosphorothioate linkage
  modified_base 23: mod_base = OTHER; note = 2'-O-methyladenosine
tttgctttcaaaataaaattaaa

SEQ ID NO: 621 - RNA, 23 nt, synthetic construct
  source 1..23: mol_type = other RNA
  modified_base 1: mod_base = OTHER; note = 2'-O-methyluridine with a 3'-phosphorothioate linkage
  modified_base 2: mod_base = OTHER; note = 2'-fluoroadenosine with a 3'-phosphorothioate linkage
  modified_base 3: mod_base = um
  modified_base 4: mod_base = OTHER; note = 2'-O-methyladenosine
  modified_base 5: mod_base = OTHER; note = 2'-fluorocytidine
  modified_base 6: mod_base = um
  modified_base 7: mod_base = OTHER; note = 2'-fluoroguanosine
  modified_base 8: mod_base = um
  modified_base 9: mod_base = OTHER; note = 2'-O-methyladenosine
  modified_base 10: mod_base = cm
  modified_base 11: mod_base = um
  modified_base 12: mod_base = gm
  modified_base 13: mod_base = um
  modified_base 14: mod_base = OTHER; note = 2'-fluorocytidine
  modified_base 15: mod_base = um
  modified_base 16: mod_base = OTHER; note = 2'-fluorouridine
  modified_base 17: mod_base = OTHER; note = 2'-O-methyladenosine
  modified_base 18: mod_base = um
  modified_base 19: mod_base = cm
  modified_base 20: mod_base = um
  modified_base 21: mod_base = OTHER; note = 2'-O-methyluridine with a 3'-phosphorothioate linkage
  modified_base 22: mod_base = OTHER; note = 2'-O-methyluridine with a 3'-phosphorothioate linkage
  modified_base 23: mod_base = gm
tatactgtactgtcttatctttg

SEQ ID NO: 622 - RNA, 23 nt, synthetic construct
  source 1..23: mol_type = other RNA
  modified_base 1: mod_base = OTHER; note = 2'-O-methyluridine with a 3'-phosphorothioate linkage
  modified_base 2: mod_base = OTHER; note = 2'-fluorocytidine with a 3'-phosphorothioate linkage
  modified_base 3: mod_base = um
  modified_base 4: mod_base = um
  modified_base 5: mod_base = OTHER; note = 2'-fluorouridine
  modified_base 6: mod_base = um
  modified_base 7: mod_base = OTHER; note = 2'-fluorouridine
  modified_base 8: mod_base = OTHER; note = 2'-O-methyladenosine
  modified_base 9: mod_base = OTHER; note = 2'-O-methyladenosine
  modified_base 10: mod_base = cm
  modified_base 11: mod_base = OTHER; note = 2'-O-methyladenosine
  modified_base 12: mod_base = um
  modified_base 13: mod_base = OTHER; note = 2'-O-methyladenosine
  modified_base 14: mod_base = OTHER; note = 2'-fluoroadenosine
  modified_base 15: mod_base = um
  modified_base 16: mod_base = OTHER; note = 2'-fluorouridine
  modified_base 17: mod_base = OTHER; note = 2'-O-methyladenosine
  modified_base 18: mod_base = um
  modified_base 19: mod_base = cm
  modified_base 20: mod_base = OTHER; note = 2'-O-methyladenosine
  modified_base 21: mod_base = OTHER; note = 2'-O-methyluridine with a 3'-phosphorothioate linkage
  modified_base 22: mod_base = OTHER; note = 2'-O-methylcytidine with a 3'-phosphorothioate linkage
  modified_base 23: mod_base = OTHER; note = 2'-O-methyladenosine
tctttttaacataattatcatca

SEQ ID NO: 623 - RNA, 23 nt, synthetic construct
  source 1..23: mol_type = other RNA
  modified_base 1: mod_base = OTHER; note = 2'-O-methyluridine with a 3'-phosphorothioate linkage
  modified_base 2: mod_base = OTHER; note = 2'-fluorouridine with a 3'-phosphorothioate linkage
  modified_base 3: mod_base = cm
  modified_base 4: mod_base = um
  modified_base 5: mod_base = OTHER; note = 2'-fluorouridine
  modified_base 6: mod_base = um
  modified_base 7: mod_base = OTHER; note = 2'-fluoroguanosine
  modified_base 8: mod_base = OTHER; note = 2'-O-methyladenosine
  modified_base 9: mod_base = cm
  modified_base 10: mod_base = OTHER; note = 2'-O-methyladenosine
  modified_base 11: mod_base = cm
  modified_base 12: mod_base = OTHER; note = 2'-O-methyladenosine
  modified_base 13: mod_base = OTHER; note = 2'-O-methyladenosine
  modified_base 14: mod_base = OTHER; note = 2'-fluoroadenosine
  modified_base 15: mod_base = gm
  modified_base 16: mod_base = OTHER; note = 2'-fluorouridine
  modified_base 17: mod_base = um
  modified_base 18: mod_base = gm
  modified_base 19: mod_base = OTHER; note = 2'-O-methyladenosine
  modified_base 20: mod_base = gm
  modified_base 21: mod_base = OTHER; note = 2'-O-methyladenosine with a 3'-phosphorothioate linkage
  modified_base 22: mod_base = OTHER; note = 2'-O-methyluridine with a 3'-phosphorothioate linkage
  modified_base 23: mod_base = OTHER; note = 2'-O-methyladenosine
ttctttgacacaaagttgagata

SEQ ID NO: 624 - RNA, 23 nt, synthetic construct
  source 1..23: mol_type = other RNA
  modified_base 1: mod_base = OTHER; note = 2'-O-methyluridine with a 3'-phosphorothioate linkage
  modified_base 2: mod_base = OTHER; note = 2'-fluorocytidine with a 3'-phosphorothioate linkage
  modified_base 3: mod_base = um
  modified_base 4: mod_base = um
  modified_base 5: mod_base = OTHER; note = 2'-fluorouridine
  modified_base 6: mod_base = gm
  modified_base 7: mod_base = OTHER; note = 2'-fluoroadenosine
  modified_base 8: mod_base = gm
  modified_base 9: mod_base = gm
  modified_base 10: mod_base = um
  modified_base 11: mod_base = OTHER; note = 2'-O-methyladenosine
  modified_base 12: mod_base = gm
  modified_base 13: mod_base = OTHER; note = 2'-O-methyladenosine
  modified_base 14: mod_base = OTHER; note = 2'-fluoroadenosine
  modified_base 15: mod_base = cm
  modified_base 16: mod_base = OTHER; note = 2'-fluoroadenosine
  modified_base 17: mod_base = OTHER; note = 2'-O-methyladenosine
  modified_base 18: mod_base = OTHER; note = 2'-O-methyladenosine
  modified_base 19: mod_base = OTHER; note = 2'-O-methyladenosine
  modified_base 20: mod_base = OTHER; note = 2'-O-methyladenosine
  modified_base 21: mod_base = OTHER; note = 2'-O-methyladenosine with a 3'-phosphorothioate linkage
  modified_base 22: mod_base = OTHER; note = 2'-O-methyladenosine with a 3'-phosphorothioate linkage
  modified_base 23: mod_base = OTHER; note = 2'-O-methyladenosine
tctttgaggtagaacaaaaaaaa

SEQ ID NO: 625 - RNA, 23 nt, synthetic construct
  source 1..23: mol_type = other RNA
  modified_base 1: mod_base = OTHER; note = 2'-O-methyluridine with a 3'-phosphorothioate linkage
  modified_base 2: mod_base = OTHER; note = 2'-fluorouridine with a 3'-phosphorothioate linkage
  modified_base 3: mod_base = um
  modified_base 4: mod_base = OTHER; note = 2'-O-methyladenosine
  modified_base 5: mod_base = OTHER; note = 2'-fluorouridine
  modified_base 6: mod_base = um
  modified_base 7: mod_base = OTHER; note = 2'-fluorouridine
  modified_base 8: mod_base = um
  modified_base 9: mod_base = OTHER; note = 2'-O-methyladenosine
  modified_base 10: mod_base = um
  modified_base 11: mod_base = OTHER; note = 2'-O-methyladenosine
  modified_base 12: mod_base = cm
  modified_base 13: mod_base = um
  modified_base 14: mod_base = OTHER; note = 2'-fluorouridine
  modified_base 15: mod_base = um
  modified_base 16: mod_base = OTHER; note = 2'-fluorouridine
  modified_base 17: mod_base = gm
  modified_base 18: mod_base = um
  modified_base 19: mod_base = OTHER; note = 2'-O-methyladenosine
  modified_base 20: mod_base = OTHER; note = 2'-O-methyladenosine
  modified_base 21: mod_base = OTHER; note = 2'-O-methyluridine with a 3'-phosphorothioate linkage
  modified_base 22: mod_base = OTHER; note = 2'-O-methyladenosine with a 3'-phosphorothioate linkage
  modified_base 23: mod_base = um
tttattttatacttttgtaatat

SEQ ID NO: 626 - RNA, 23 nt, synthetic construct
  source 1..23: mol_type = other RNA
  modified_base 1: mod_base = OTHER; note = 2'-O-methyluridine with a 3'-phosphorothioate linkage
  modified_base 2: mod_base = OTHER; note = 2'-fluoroadenosine with a 3'-phosphorothioate linkage
  modified_base 3: mod_base = OTHER; note = 2'-O-methyladenosine
  modified_base 4: mod_base = um
  modified_base 5: mod_base = OTHER; note = 2'-fluorouridine
  modified_base 6: mod_base = OTHER; note = 2'-O-methyladenosine
  modified_base 7: mod_base = OTHER; note = 2'-fluorouridine
  modified_base 8: mod_base = cm
  modified_base 9: mod_base = OTHER; note = 2'-O-methyladenosine
  modified_base 10: mod_base = um
  modified_base 11: mod_base = cm
  modified_base 12: mod_base = OTHER; note = 2'-O-methyladenosine
  modified_base 13: mod_base = um
  modified_base 14: mod_base = OTHER; note = 2'-fluorouridine
  modified_base 15: mod_base = OTHER; note = 2'-O-methyladenosine
  modified_base 16: mod_base = OTHER; note = 2'-fluoroguanosine
  modified_base 17: mod_base = gm
  modified_base 18: mod_base = cm
  modified_base 19: mod_base = um
  modified_base 20: mod_base = um
  modified_base 21: mod_base = OTHER; note = 2'-O-methyluridine with a 3'-phosphorothioate linkage
  modified_base 22: mod_base = OTHER; note = 2'-O-methylguanosine with a 3'-phosphorothioate linkage
  modified_base 23: mod_base = cm
taattatcatcattaggctttgc

SEQ ID NO: 627 - RNA, 23 nt, synthetic construct
  source 1..23: mol_type = other RNA
  modified_base 1: mod_base = OTHER; note = 2'-O-methyluridine with a 3'-phosphorothioate linkage
  modified_base 2: mod_base = OTHER; note = 2'-fluoroadenosine with a 3'-phosphorothioate linkage
  modified_base 3: mod_base = um
  modified_base 4: mod_base = gm
  modified_base 5: mod_base = OTHER; note = 2'-fluoroguanosine
  modified_base 6: mod_base = OTHER; note = 2'-O-methyladenosine
  modified_base 7: mod_base = OTHER; note = 2'-fluoroadenosine
  modified_base 8: mod_base = OTHER; note = 2'-O-methyladenosine
  modified_base 9: mod_base = OTHER; note = 2'-O-methyladenosine
  modified_base 10: mod_base = gm
  modified_base 11: mod_base = OTHER; note = 2'-O-methyladenosine
  modified_base 12: mod_base = OTHER; note = 2'-O-methyladenosine
  modified_base 13: mod_base = OTHER; note = 2'-O-methyladenosine
  modified_base 14: mod_base = OTHER; note = 2'-fluoroguanosine
  modified_base 15: mod_base = cm
  modified_base 16: mod_base = OTHER; note = 2'-fluorouridine
  modified_base 17: mod_base = OTHER; note = 2'-O-methyladenosine
  modified_base 18: mod_base = um
  modified_base 19: mod_base = gm
  modified_base 20: mod_base = OTHER; note = 2'-O-methyladenosine
  modified_base 21: mod_base = OTHER; note = 2'-O-methylguanosine with a 3'-phosphorothioate linkage
  modified_base 22: mod_base = OTHER; note = 2'-O-methyladenosine with a 3'-phosphorothioate linkage
  modified_base 23: mod_base = gm
tatggaaaagaaagctatgagag

SEQ ID NO: 628 - RNA, 23 nt, synthetic construct
  source 1..23: mol_type = other RNA
  modified_base 1: mod_base = OTHER; note = 2'-O-methyluridine with a 3'-phosphorothioate linkage
  modified_base 2: mod_base = OTHER; note = 2'-fluorocytidine with a 3'-phosphorothioate linkage
  modified_base 3: mod_base = um
  modified_base 4: mod_base = um
  modified_base 5: mod_base = OTHER; note = 2'-fluorocytidine
  modified_base 6: mod_base = OTHER; note = 2'-O-methyladenosine
  modified_base 7: mod_base = OTHER; note = 2'-fluoroadenosine
  modified_base 8: mod_base = OTHER; note = 2'-O-methyladenosine
  modified_base 9: mod_base = OTHER; note = 2'-O-methyladenosine
  modified_base 10: mod_base = um
  modified_base 11: mod_base = OTHER; note = 2'-O-methyladenosine
  modified_base 12: mod_base = cm
  modified_base 13: mod_base = OTHER; note = 2'-O-methyladenosine
  modified_base 14: mod_base = OTHER; note = 2'-fluorouridine
  modified_base 15: mod_base = um
  modified_base 16: mod_base = OTHER; note = 2'-fluoroadenosine
  modified_base 17: mod_base = um
  modified_base 18: mod_base = OTHER; note = 2'-O-methyladenosine
  modified_base 19: mod_base = um
  modified_base 20: mod_base = gm
  modified_base 21: mod_base = OTHER; note = 2'-O-methylcytidine with a 3'-phosphorothioate linkage
  modified_base 22: mod_base = OTHER; note = 2'-O-methyluridine with a 3'-phosphorothioate linkage
  modified_base 23: mod_base = OTHER; note = 2'-O-methyladenosine
tcttcaaaatacattatatgcta

SEQ ID NO: 629 - RNA, 23 nt, synthetic construct
  source 1..23: mol_type = other RNA
  modified_base 1: mod_base = OTHER; note = 2'-O-methyluridine with a 3'-phosphorothioate linkage
  modified_base 2: mod_base = OTHER; note = 2'-fluorocytidine with a 3'-phosphorothioate linkage
  modified_base 3: mod_base = um
  modified_base 4: mod_base = um
  modified_base 5: mod_base = OTHER; note = 2'-fluorocytidine
  modified_base 6: mod_base = um
  modified_base 7: mod_base = OTHER; note = 2'-fluorouridine
  modified_base 8: mod_base = OTHER; note = 2'-O-methyladenosine
  modified_base 9: mod_base = OTHER; note = 2'-O-methyladenosine
  modified_base 10: mod_base = um
  modified_base 11: mod_base = OTHER; note = 2'-O-methyladenosine
  modified_base 12: mod_base = cm
  modified_base 13: mod_base = gm
  modified_base 14: mod_base = OTHER; note = 2'-fluoroadenosine
  modified_base 15: mod_base = OTHER; note = 2'-O-methyladenosine
  modified_base 16: mod_base = OTHER; note = 2'-fluoroguanosine
  modified_base 17: mod_base = OTHER; note = 2'-O-methyladenosine
  modified_base 18: mod_base = gm
  modified_base 19: mod_base = cm
  modified_base 20: mod_base = OTHER; note = 2'-O-methyladenosine
  modified_base 21: mod_base = OTHER; note = 2'-O-methylguanosine with a 3'-phosphorothioate linkage
  modified_base 22: mod_base = OTHER; note = 2'-O-methyluridine with a 3'-phosphorothioate linkage
  modified_base 23: mod_base = um
tcttcttaatacgaagagcagtt

SEQ ID NO: 630 - RNA, 23 nt, synthetic construct
  source 1..23: mol_type = other RNA
  modified_base 1: mod_base = OTHER; note = 2'-O-methyluridine with a 3'-phosphorothioate linkage
  modified_base 2: mod_base = OTHER; note = 2'-fluoroguanosine with a 3'-phosphorothioate linkage
  modified_base 3: mod_base = gm
  modified_base 4: mod_base = um
  modified_base 5: mod_base = OTHER; note = 2'-fluorouridine
  modified_base 6: mod_base = cm
  modified_base 7: mod_base = OTHER; note = 2'-fluoroadenosine
  modified_base 8: mod_base = OTHER; note = 2'-O-methyladenosine
  modified_base 9: mod_base = gm
  modified_base 10: mod_base = um
  modified_base 11: mod_base = OTHER; note = 2'-O-methyladenosine
  modified_base 12: mod_base = OTHER; note = 2'-O-methyladenosine
  modified_base 13: mod_base = OTHER; note = 2'-O-methyladenosine
  modified_base 14: mod_base = OTHER; note = 2'-fluoroadenosine
  modified_base 15: mod_base = um
  modified_base 16: mod_base = OTHER; note = 2'-fluoroadenosine
  modified_base 17: mod_base = OTHER; note = 2'-O-methyladenosine
  modified_base 18: mod_base = OTHER; note = 2'-O-methyladenosine
  modified_base 19: mod_base = OTHER; note = 2'-O-methyladenosine
  modified_base 20: mod_base = OTHER; note = 2'-O-methyladenosine
  modified_base 21: mod_base = OTHER; note = 2'-O-methylcytidine with a 3'-phosphorothioate linkage
  modified_base 22: mod_base = OTHER; note = 2'-O-methyluridine with a 3'-phosphorothioate linkage
  modified_base 23: mod_base = um
tggttcaagtaaaataaaaactt

SEQ ID NO: 631 - RNA, 23 nt, synthetic construct
  source 1..23: mol_type = other RNA
  modified_base 1: mod_base = OTHER; note = 2'-O-methyluridine with a 3'-phosphorothioate linkage
  modified_base 2: mod_base = OTHER; note = 2'-fluorouridine with a 3'-phosphorothioate linkage
  modified_base 3: mod_base = cm
  modified_base 4: mod_base = OTHER; note = 2'-O-methyladenosine
  modified_base 5: mod_base = OTHER; note = 2'-fluorocytidine
  modified_base 6: mod_base = OTHER; note = 2'-O-methyladenosine
  modified_base 7: mod_base = OTHER; note = 2'-fluorouridine
  modified_base 8: mod_base = OTHER; note = 2'-O-methyladenosine
  modified_base 9: mod_base = OTHER; note = 2'-O-methyladenosine
  modified_base 10: mod_base = OTHER; note = 2'-O-methyladenosine
  modified_base 11: mod_base = gm
  modified_base 12: mod_base = gm
  modified_base 13: mod_base = gm
  modified_base 14: mod_base = OTHER; note = 2'-fluoroguanosine
  modified_base 15: mod_base = OTHER; note = 2'-O-methyladenosine
  modified_base 16: mod_base = OTHER; note = 2'-fluoroadenosine
  modified_base 17: mod_base = OTHER; note = 2'-O-methyladenosine
  modified_base 18: mod_base = OTHER; note = 2'-O-methyladenosine
  modified_base 19: mod_base = um
  modified_base 20: mod_base = gm
  modified_base 21: mod_base = OTHER; note = 2'-O-methylguanosine with a 3'-phosphorothioate linkage
  modified_base 22: mod_base = OTHER; note = 2'-O-methyladenosine with a 3'-phosphorothioate linkage
  modified_base 23: mod_base = OTHER; note = 2'-O-methyladenosine
ttcacataaaggggaaaatggaa

SEQ ID NO: 632 - RNA, 23 nt, synthetic construct
  source 1..23: mol_type = other RNA
  modified_base 1: mod_base = OTHER; note = 2'-O-methyluridine with a 3'-phosphorothioate linkage
  modified_base 2: mod_base = OTHER; note = 2'-fluoroadenosine with a 3'-phosphorothioate linkage
  modified_base 3: mod_base = um
  modified_base 4: mod_base = um
  modified_base 5: mod_base = OTHER; note = 2'-fluorouridine
  modified_base 6: mod_base = um
  modified_base 7: mod_base = OTHER; note = 2'-fluoroadenosine
  modified_base 8: mod_base = um
  modified_base 9: mod_base = OTHER; note = 2'-O-methyladenosine
  modified_base 10: mod_base = cm
  modified_base 11: mod_base = um
  modified_base 12: mod_base = um
  modified_base 13: mod_base = um
  modified_base 14: mod_base = OTHER; note = 2'-fluorouridine
  modified_base 15: mod_base = gm
  modified_base 16: mod_base = OTHER; note = 2'-fluorouridine
  modified_base 17: mod_base = OTHER; note = 2'-O-methyladenosine
  modified_base 18: mod_base = OTHER; note = 2'-O-methyladenosine
  modified_base 19: mod_base = um
  modified_base 20: mod_base = OTHER; note = 2'-O-methyladenosine
  modified_base 21: mod_base = OTHER; note = 2'-O-methyluridine with a 3'-phosphorothioate linkage
  modified_base 22: mod_base = OTHER; note = 2'-O-methyladenosine with a 3'-phosphorothioate linkage
  modified_base 23: mod_base = um
tattttatacttttgtaatatat

SEQ ID NO: 633 - RNA, 23 nt, synthetic construct
  source 1..23: mol_type = other RNA
  modified_base 1: mod_base = OTHER; note = 2'-O-methyluridine with a 3'-phosphorothioate linkage
  modified_base 2: mod_base = OTHER; note = 2'-fluorouridine with a 3'-phosphorothioate linkage
  modified_base 3: mod_base = cm
  modified_base 4: mod_base = OTHER; note = 2'-O-methyladenosine
  modified_base 5: mod_base = OTHER; note = 2'-fluorouridine
  modified_base 6: mod_base = cm
  modified_base 7: mod_base = OTHER; note = 2'-fluoroadenosine
  modified_base 8: mod_base = OTHER; note = 2'-O-methyladenosine
  modified_base 9: mod_base = gm
  modified_base 10: mod_base = cm
  modified_base 11: mod_base = OTHER; note = 2'-O-methyladenosine
  modified_base 12: mod_base = um
  modified_base 13: mod_base = um
  modified_base 14: mod_base = OTHER; note = 2'-fluorouridine
  modified_base 15: mod_base = cm
  modified_base 16: mod_base = OTHER; note = 2'-fluoroadenosine
  modified_base 17: mod_base = gm
  modified_base 18: mod_base = gm
  modified_base 19: mod_base = OTHER; note = 2'-O-methyladenosine
  modified_base 20: mod_base = gm
  modified_base 21: mod_base = OTHER; note = 2'-O-methylcytidine with a 3'-phosphorothioate linkage
  modified_base 22: mod_base = OTHER; note = 2'-O-methylcytidine with a 3'-phosphorothioate linkage
  modified_base 23: mod_base = OTHER; note = 2'-O-methyladenosine
ttcatcaagcatttcaggagcca

SEQ ID NO: 634 - RNA, 23 nt, synthetic construct
  source 1..23: mol_type = other RNA
  modified_base 1: mod_base = OTHER; note = 2'-O-methyluridine with a 3'-phosphorothioate linkage
  modified_base 2: mod_base = OTHER; note = 2'-fluorouridine with a 3'-phosphorothioate linkage
  modified_base 3: mod_base = um
  modified_base 4: mod_base = um
  modified_base 5: mod_base = OTHER; note = 2'-fluorocytidine
  modified_base 6: mod_base = um
  modified_base 7: mod_base = OTHER; note = 2'-fluorouridine
  modified_base 8: mod_base = um
  modified_base 9: mod_base = um
  modified_base 10: mod_base = um
  modified_base 11: mod_base = OTHER; note = 2'-O-methyladenosine
  modified_base 12: mod_base = OTHER; note = 2'-O-methyladenosine
  modified_base 13: mod_base = cm
  modified_base 14: mod_base = OTHER; note = 2'-fluoroadenosine
  modified_base 15: mod_base = um
  modified_base 16: mod_base = OTHER; note = 2'-fluoroadenosine
  modified_base 17: mod_base = OTHER; note = 2'-O-methyladenosine
  modified_base 18: mod_base = um
  modified_base 19: mod_base = um
  modified_base 20: mod_base = OTHER; note = 2'-O-methyladenosine
  modified_base 21: mod_base = OTHER; note = 2'-O-methyluridine with a 3'-phosphorothioate linkage
  modified_base 22: mod_base = OTHER; note = 2'-O-methylcytidine with a 3'-phosphorothioate linkage
  modified_base 23: mod_base = OTHER; note = 2'-O-methyladenosine
ttttctttttaacataattatca

SEQ ID NO: 635 - RNA, 23 nt, synthetic construct
  source 1..23: mol_type = other RNA
  modified_base 1: mod_base = OTHER; note = 2'-O-methyluridine with a 3'-phosphorothioate linkage
  modified_base 2: mod_base = OTHER; note = 2'-fluorouridine with a 3'-phosphorothioate linkage
  modified_base 3: mod_base = um
  modified_base 4: mod_base = um
  modified_base 5: mod_base = OTHER; note = 2'-fluorouridine
  modified_base 6: mod_base = OTHER; note = 2'-O-methyladenosine
  modified_base 7: mod_base = OTHER; note = 2'-fluoroadenosine
  modified_base 8: mod_base = cm
  modified_base 9: mod_base = OTHER; note = 2'-O-methyladenosine
  modified_base 10: mod_base = um
  modified_base 11: mod_base = OTHER; note = 2'-O-methyladenosine
  modified_base 12: mod_base = OTHER; note = 2'-O-methyladenosine
  modified_base 13: mod_base = um
  modified_base 14: mod_base = OTHER; note = 2'-fluorouridine
  modified_base 15: mod_base = OTHER; note = 2'-O-methyladenosine
  modified_base 16: mod_base = OTHER; note = 2'-fluorouridine
  modified_base 17: mod_base = cm
  modified_base 18: mod_base = OTHER; note = 2'-O-methyladenosine
  modified_base 19: mod_base = um
  modified_base 20: mod_base = cm
  modified_base 21: mod_base = OTHER; note = 2'-O-methyladenosine with a 3'-phosphorothioate linkage
  modified_base 22: mod_base = OTHER; note = 2'-O-methyluridine with a 3'-phosphorothioate linkage
  modified_base 23: mod_base = um
tttttaacataattatcatcatt

SEQ ID NO: 636 - RNA, 23 nt, synthetic construct
  source 1..23: mol_type = other RNA
  modified_base 1: mod_base = OTHER; note = 2'-O-methyluridine with a 3'-phosphorothioate linkage
  modified_base 2: mod_base = OTHER; note = 2'-fluorouridine with a 3'-phosphorothioate linkage
  modified_base 3: mod_base = cm
  modified_base 4: mod_base = OTHER; note = 2'-O-methyladenosine
  modified_base 5: mod_base = OTHER; note = 2'-fluorouridine
  modified_base 6: mod_base = cm
  modified_base 7: mod_base = OTHER; note = 2'-fluoroadenosine
  modified_base 8: mod_base = um
  modified_base 9: mod_base = um
  modified_base 10: mod_base = OTHER; note = 2'-O-methyladenosine
  modified_base 11: mod_base = gm
  modified_base 12: mod_base = gm
  modified_base 13: mod_base = cm
  modified_base 14: mod_base = OTHER; note = 2'-fluorouridine
  modified_base 15: mod_base = um
  modified_base 16: mod_base = OTHER; note = 2'-fluorouridine
  modified_base 17: mod_base = gm
  modified_base 18: mod_base = cm
  modified_base 19: mod_base = OTHER; note = 2'-O-methyladenosine
  modified_base 20: mod_base = gm
  modified_base 21: mod_base = OTHER; note = 2'-O-methyluridine with a 3'-phosphorothioate linkage
  modified_base 22: mod_base = OTHER; note = 2'-O-methylcytidine with a 3'-phosphorothioate linkage
  modified_base 23: mod_base = um
ttcatcattaggctttgcagtct

SEQ ID NO: 637 - RNA, 23 nt, synthetic construct
  source 1..23: mol_type = other RNA
  modified_base 1: mod_base = OTHER; note = 2'-O-methyluridine with a 3'-phosphorothioate linkage
  modified_base 2: mod_base = OTHER; note = 2'-fluoroadenosine with a 3'-phosphorothioate linkage
  modified_base 3: mod_base = um
  modified_base 4: mod_base = OTHER; note = 2'-O-methyladenosine
  modified_base 5: mod_base = OTHER; note = 2'-fluoroguanosine
  modified_base 6: mod_base = cm
  modified_base 7: mod_base = OTHER; note = 2'-fluoroadenosine
  modified_base 8: mod_base = gm
  modified_base 9: mod_base = gm
  modified_base 10: mod_base = um
  modified_base 11: mod_base = um
  modified_base 12: mod_base = um
  modified_base 13: mod_base = OTHER; note = 2'-O-methyladenosine
  modified_base 14: mod_base = OTHER; note = 2'-fluorocytidine
  modified_base 15: mod_base = cm
  modified_base 16: mod_base = OTHER; note = 2'-fluorouridine
  modified_base 17: mod_base = um
  modified_base 18: mod_base = gm
  modified_base 19: mod_base = um
  modified_base 20: mod_base = gm
  modified_base 21: mod_base = OTHER; note = 2'-O-methyluridine with a 3'-phosphorothioate linkage
  modified_base 22: mod_base = OTHER; note = 2'-O-methyladenosine with a 3'-phosphorothioate linkage
  modified_base 23: mod_base = cm
tatagcaggtttaccttgtgtac

SEQ ID NO: 638 - RNA, 23 nt, synthetic construct
  source 1..23: mol_type = other RNA
  modified_base 1: mod_base = OTHER; note = 2'-O-methyluridine with a 3'-phosphorothioate linkage
  modified_base 2: mod_base = OTHER; note = 2'-fluorouridine with a 3'-phosphorothioate linkage
  modified_base 3: mod_base = cm
  modified_base 4: mod_base = um
  modified_base 5: mod_base = OTHER; note = 2'-fluorouridine
  modified_base 6: mod_base = um
  modified_base 7: mod_base = OTHER; note = 2'-fluorouridine
  modified_base 8: mod_base = um
  modified_base 9: mod_base = OTHER; note = 2'-O-methyladenosine
  modified_base 10: mod_base = OTHER; note = 2'-O-methyladenosine
  modified_base 11: mod_base = cm
  modified_base 12: mod_base = OTHER; note = 2'-O-methyladenosine
  modified_base 13: mod_base = um
  modified_base 14: mod_base = OTHER; note = 2'-fluoroadenosine
  modified_base 15: mod_base = OTHER; note = 2'-O-methyladenosine
  modified_base 16: mod_base = OTHER; note = 2'-fluorouridine
  modified_base 17: mod_base = um
  modified_base 18: mod_base = OTHER; note = 2'-O-methyladenosine
  modified_base 19: mod_base = um
  modified_base 20: mod_base = cm
  modified_base 21: mod_base = OTHER; note = 2'-O-methyladenosine with a 3'-phosphorothioate linkage
  modified_base 22: mod_base = OTHER; note = 2'-O-methyluridine with a 3'-phosphorothioate linkage
  modified_base 23: mod_base = cm
ttctttttaacataattatcatc

SEQ ID NO: 639 - RNA, 23 nt, synthetic construct
  source 1..23: mol_type = other RNA
  modified_base 1: mod_base = OTHER; note = 2'-O-methyluridine with a 3'-phosphorothioate linkage
  modified_base 2: mod_base = OTHER; note = 2'-fluorouridine with a 3'-phosphorothioate linkage
  modified_base 3: mod_base = cm
  modified_base 4: mod_base = OTHER; note = 2'-O-methyladenosine
  modified_base 5: mod_base = OTHER; note = 2'-fluorouridine
  modified_base 6: mod_base = um
  modified_base 7: mod_base = OTHER; note = 2'-fluoroadenosine
  modified_base 8: mod_base = gm
  modified_base 9: mod_base = gm
  modified_base 10: mod_base = cm
  modified_base 11: mod_base = um
  modified_base 12: mod_base = um
  modified_base 13: mod_base = um
  modified_base 14: mod_base = OTHER; note = 2'-fluoroguanosine
  modified_base 15: mod_base = cm
  modified_base 16: mod_base = OTHER; note = 2'-fluoroadenosine
  modified_base 17: mod_base = gm
  modified_base 18: mod_base = um
  modified_base 19: mod_base = cm
  modified_base 20: mod_base = um
  modified_base 21: mod_base = OTHER; note = 2'-O-methyluridine with a 3'-phosphorothioate linkage
  modified_base 22: mod_base = OTHER; note = 2'-O-methylcytidine with a 3'-phosphorothioate linkage
  modified_base 23: mod_base = um
ttcattaggctttgcagtcttct

SEQ ID NO: 640 - RNA, 23 nt, synthetic construct
  source 1..23: mol_type = other RNA
  modified_base 1: mod_base = OTHER; note = 2'-O-methyluridine with a 3'-phosphorothioate linkage
  modified_base 2: mod_base = OTHER; note = 2'-fluorouridine with a 3'-phosphorothioate linkage
  modified_base 3: mod_base = OTHER; note = 2'-O-methyladenosine
  modified_base 4: mod_base = um
  modified_base 5: mod_base = OTHER; note = 2'-fluoroadenosine
  modified_base 6: mod_base = cm
  modified_base 7: mod_base = OTHER; note = 2'-fluorouridine
  modified_base 8: mod_base = um
  modified_base 9: mod_base = um
  modified_base 10: mod_base = um
  modified_base 11: mod_base = gm
  modified_base 12: mod_base = um
  modified_base 13: mod_base = OTHER; note = 2'-O-methyladenosine
  modified_base 14: mod_base = OTHER; note = 2'-fluoroadenosine
  modified_base 15: mod_base = um
  modified_base 16: mod_base = OTHER; note = 2'-fluoroadenosine
  modified_base 17: mod_base = um
  modified_base 18: mod_base = OTHER; note = 2'-O-methyladenosine
  modified_base 19: mod_base = um
  modified_base 20: mod_base = um
  modified_base 21: mod_base = OTHER; note = 2'-O-methyluridine with a 3'-phosphorothioate linkage
  modified_base 22: mod_base = OTHER; note = 2'-O-methylcytidine with a 3'-phosphorothioate linkage
  modified_base 23: mod_base = um
ttatacttttgtaatatatttct

SEQ ID NO: 641 - RNA, 23 nt, synthetic construct
  source 1..23: mol_type = other RNA
  modified_base 1: mod_base = OTHER; note = 2'-O-methyluridine with a 3'-phosphorothioate linkage
  modified_base 2: mod_base = OTHER; note = 2'-fluorouridine with a 3'-phosphorothioate linkage
  modified_base 3: mod_base = cm
  modified_base 4: mod_base = um
  modified_base 5: mod_base = OTHER; note = 2'-fluorouridine
  modified_base 6: mod_base = OTHER; note = 2'-O-methyladenosine
  modified_base 7: mod_base = OTHER; note = 2'-fluoroadenosine
  modified_base 8: mod_base = um
  modified_base 9: mod_base = OTHER; note = 2'-O-methyladenosine
  modified_base 10: mod_base = cm
  modified_base 11: mod_base = gm
  modified_base 12: mod_base = OTHER; note = 2'-O-methyladenosine
  modified_base 13: mod_base = OTHER; note = 2'-O-methyladenosine
  modified_base 14: mod_base = OTHER; note = 2'-fluoroguanosine
  modified_base 15: mod_base = OTHER; note = 2'-O-methyladenosine
  modified_base 16: mod_base = OTHER; note = 2'-fluoroguanosine
  modified_base 17: mod_base = cm
  modified_base 18: mod_base = OTHER; note = 2'-O-methyladenosine
  modified_base 19: mod_base = gm
  modified_base 20: mod_base = um
  modified_base 21: mod_base = OTHER; note = 2'-O-methyluridine with a 3'-phosphorothioate linkage
  modified_base 22: mod_base = OTHER; note = 2'-O-methyladenosine with a 3'-phosphorothioate linkage
  modified_base 23: mod_base = gm
ttcttaatacgaagagcagttag

SEQ ID NO: 642 - RNA, 23 nt, synthetic construct
  source 1..23: mol_type = other RNA
  modified_base 1: mod_base = OTHER; note = 2'-O-methyluridine with a 3'-phosphorothioate linkage
  modified_base 2: mod_base = OTHER; note = 2'-fluoroguanosine with a 3'-phosphorothioate linkage
  modified_base 3: mod_base = um
  modified_base 4: mod_base = OTHER; note = 2'-O-methyladenosine
  modified_base 5: mod_base = OTHER; note = 2'-fluorocytidine
  modified_base 6: mod_base = um
  modified_base 7: mod_base = OTHER; note = 2'-fluoroguanosine
  modified_base 8: mod_base = um
  modified_base 9: mod_base = cm
  modified_base 10: mod_base = um
  modified_base 11: mod_base = um
  modified_base 12: mod_base = OTHER; note = 2'-O-methyladenosine
  modified_base 13: mod_base = um
  modified_base 14: mod_base = OTHER; note = 2'-fluorocytidine
  modified_base 15: mod_base = um
  modified_base 16: mod_base = OTHER; note = 2'-fluorouridine
  modified_base 17: mod_base = um
  modified_base 18: mod_base = gm
  modified_base 19: mod_base = OTHER; note = 2'-O-methyladenosine
  modified_base 20: mod_base = gm
  modified_base 21: mod_base = OTHER; note = 2'-O-methylguanosine with a 3'-phosphorothioate linkage
  modified_base 22: mod_base = OTHER; note = 2'-O-methyluridine with a 3'-phosphorothioate linkage
  modified_base 23: mod_base = OTHER; note = 2'-O-methyladenosine
tgtactgtcttatctttgaggta

SEQ ID NO: 643 - RNA, 23 nt, synthetic construct
  source 1..23: mol_type = other RNA
  modified_base 1: mod_base = OTHER; note = 2'-O-methyluridine with a 3'-phosphorothioate linkage
  modified_base 2: mod_base = OTHER; note = 2'-fluorouridine with a 3'-phosphorothioate linkage
  modified_base 3: mod_base = gm
  modified_base 4: mod_base = um
  modified_base 5: mod_base = OTHER; note = 2'-fluoroguanosine
  modified_base 6: mod_base = cm
  modified_base 7: mod_base = OTHER; note = 2'-fluorouridine
  modified_base 8: mod_base = cm
  modified_base 9: mod_base = um
  modified_base 10: mod_base = um
  modified_base 11: mod_base = gm
  modified_base 12: mod_base = gm
  modified_base 13: mod_base = um
  modified_base 14: mod_base = OTHER; note = 2'-fluorouridine
  modified_base 15: mod_base = cm
  modified_base 16: mod_base = OTHER; note = 2'-fluoroadenosine
  modified_base 17: mod_base = OTHER; note = 2'-O-methyladenosine
  modified_base 18: mod_base = gm
  modified_base 19: mod_base = um
  modified_base 20: mod_base = OTHER; note = 2'-O-methyladenosine
  modified_base 21: mod_base = OTHER; note = 2'-O-methyladenosine with a 3'-phosphorothioate linkage
  modified_base 22: mod_base = OTHER; note = 2'-O-methyladenosine with a 3'-phosphorothioate linkage
  modified_base 23: mod_base = OTHER; note = 2'-O-methyladenosine
ttgtgctcttggttcaagtaaaa

SEQ ID NO: 644 - RNA, 23 nt, synthetic construct
  source 1..23: mol_type = other RNA
  modified_base 1: mod_base = OTHER; note = 2'-O-methyluridine with a 3'-phosphorothioate linkage
  modified_base 2: mod_base = OTHER; note = 2'-fluorouridine with a 3'-phosphorothioate linkage
  modified_base 3: mod_base = um
  modified_base 4: mod_base = um
  modified_base 5: mod_base = OTHER; note = 2'-fluoroguanosine
  modified_base 6: mod_base = OTHER; note = 2'-O-methyladenosine
  modified_base 7: mod_base = OTHER; note = 2'-fluorocytidine
  modified_base 8: mod_base = OTHER; note = 2'-O-methyladenosine
  modified_base 9: mod_base = cm
  modified_base 10: mod_base = OTHER; note = 2'-O-methyladenosine
  modified_base 11: mod_base = OTHER; note = 2'-O-methyladenosine
  modified_base 12: mod_base = OTHER; note = 2'-O-methyladenosine
  modified_base 13: mod_base = gm
  modified_base 14: mod_base = OTHER; note = 2'-fluorouridine
  modified_base 15: mod_base = um
  modified_base 16: mod_base = OTHER; note = 2'-fluoroguanosine
  modified_base 17: mod_base = OTHER; note = 2'-O-methyladenosine
  modified_base 18: mod_base = gm
  modified_base 19: mod_base = OTHER; note = 2'-O-methyladenosine
  modified_base 20: mod_base = um
  modified_base 21: mod_base = OTHER; note = 2'-O-methyladenosine with a 3'-phosphorothioate linkage
  modified_base 22: mod_base = OTHER; note = 2'-O-methyluridine with a 3'-phosphorothioate linkage
  modified_base 23: mod_base = OTHER; note = 2'-O-methyladenosine
ttttgacacaaagttgagatata

SEQ ID NO: 645 - RNA, 23 nt, synthetic construct
  source 1..23: mol_type = other RNA
  modified_base 1: mod_base = OTHER; note = 2'-O-methyluridine with a 3'-phosphorothioate linkage
  modified_base 2: mod_base = OTHER; note = 2'-fluorouridine with a 3'-phosphorothioate linkage
  modified_base 3: mod_base = OTHER; note = 2'-O-methyladenosine
  modified_base 4: mod_base = um
  modified_base 5: mod_base = OTHER; note = 2'-fluorocytidine
  modified_base 6: mod_base = OTHER; note = 2'-O-methyladenosine
  modified_base 7: mod_base = OTHER; note = 2'-fluorouridine
  modified_base 8: mod_base = cm
  modified_base 9: mod_base = OTHER; note = 2'-O-methyladenosine
  modified_base 10: mod_base = um
  modified_base 11: mod_base = um
  modified_base 12: mod_base = OTHER; note = 2'-O-methyladenosine
  modified_base 13: mod_base = gm
  modified_base 14: mod_base = OTHER; note = 2'-fluoroguanosine
  modified_base 15: mod_base = cm
  modified_base 16: mod_base = OTHER; note = 2'-fluorouridine
  modified_base 17: mod_base = um
  modified_base 18: mod_base = um
  modified_base 19: mod_base = gm
  modified_base 20: mod_base = cm
  modified_base 21: mod_base = OTHER; note = 2'-O-methyladenosine with a 3'-phosphorothioate linkage
  modified_base 22: mod_base = OTHER; note = 2'-O-methylguanosine with a 3'-phosphorothioate linkage
  modified_base 23: mod_base = um
ttatcatcattaggctttgcagt

SEQ ID NO: 646 - RNA, 23 nt, synthetic construct
  source 1..23: mol_type = other RNA
  modified_base 1: mod_base = OTHER; note = 2'-O-methyluridine with a 3'-phosphorothioate linkage
  modified_base 2: mod_base = OTHER; note = 2'-fluorouridine with a 3'-phosphorothioate linkage
  modified_base 3: mod_base = OTHER; note = 2'-O-methyladenosine
  modified_base 4: mod_base = um
  modified_base 5: mod_base = OTHER; note = 2'-fluorouridine
  modified_base 6: mod_base = um
  modified_base 7: mod_base = OTHER; note = 2'-fluorouridine
  modified_base 8: mod_base = OTHER; note = 2'-O-methyladenosine
  modified_base 9: mod_base = um
  modified_base 10: mod_base = OTHER; note = 2'-O-methyladenosine
  modified_base 11: mod_base = cm
  modified_base 12: mod_base = um
  modified_base 13: mod_base = um
  modified_base 14: mod_base = OTHER; note = 2'-fluorouridine
  modified_base 15: mod_base = um
  modified_base 16: mod_base = OTHER; note = 2'-fluoroguanosine
  modified_base 17: mod_base = um
  modified_base 18: mod_base = OTHER; note = 2'-O-methyladenosine
  modified_base 19: mod_base = OTHER; note = 2'-O-methyladenosine
  modified_base 20: mod_base = um
  modified_base 21: mod_base = OTHER; note = 2'-O-methyladenosine with a 3'-phosphorothioate linkage
  modified_base 22: mod_base = OTHER; note = 2'-O-methyluridine with a 3'-phosphorothioate linkage
  modified_base 23: mod_base = OTHER; note = 2'-O-methyladenosine
ttattttatacttttgtaatata

SEQ ID NO: 647 - RNA, 23 nt, synthetic construct
  source 1..23: mol_type = other RNA
  modified_base 1: mod_base = OTHER; note = 2'-O-methyluridine with a 3'-phosphorothioate linkage
  modified_base 2: mod_base = OTHER; note = 2'-fluorouridine with a 3'-phosphorothioate linkage
  modified_base 3: mod_base = um
  modified_base 4: mod_base = cm
  modified_base 5: mod_base = OTHER; note = 2'-fluoroadenosine
  modified_base 6: mod_base = um
  modified_base 7: mod_base = OTHER; note = 2'-fluoroguanosine
  modified_base 8: mod_base = OTHER; note = 2'-O-methyladenosine
  modified_base 9: mod_base = um
  modified_base 10: mod_base = OTHER; note = 2'-O-methyladenosine
  modified_base 11: mod_base = um
  modified_base 12: mod_base = um
  modified_base 13: mod_base = cm
  modified_base 14: mod_base = OTHER; note = 2'-fluoroadenosine
  modified_base 15: mod_base = gm
  modified_base 16: mod_base = OTHER; note = 2'-fluoroadenosine
  modified_base 17: mod_base = um
  modified_base 18: mod_base = OTHER; note = 2'-O-methyladenosine
  modified_base 19: mod_base = cm
  modified_base 20: mod_base = cm
  modified_base 21: mod_base = OTHER; note = 2'-O-methyladenosine with a 3'-phosphorothioate linkage
  modified_base 22: mod_base = OTHER; note = 2'-O-methylguanosine with a 3'-phosphorothioate linkage
  modified_base 23: mod_base = cm
tttcatgatattcagataccagc

SEQ ID NO: 648 - RNA, 23 nt, synthetic construct
  source 1..23: mol_type = other RNA
  modified_base 1: mod_base = OTHER; note = 2'-O-methyluridine with a 3'-phosphorothioate linkage
  modified_base 2: mod_base = OTHER; note = 2'-fluorouridine with a 3'-phosphorothioate linkage
  modified_base 3: mod_base = OTHER; note = 2'-O-methyladenosine
  modified_base 4: mod_base = gm
  modified_base 5: mod_base = OTHER; note = 2'-fluoroadenosine
  modified_base 6: mod_base = um
  modified_base 7: mod_base = OTHER; note = 2'-fluoroguanosine
  modified_base 8: mod_base = um
  modified_base 9: mod_base = cm
  modified_base 10: mod_base = OTHER; note = 2'-O-methyladenosine
  modified_base 11: mod_base = gm
  modified_base 12: mod_base = cm
  modified_base 13: mod_base = um
  modified_base 14: mod_base = OTHER; note = 2'-fluorocytidine
  modified_base 15: mod_base = gm
  modified_base 16: mod_base = OTHER; note = 2'-fluorouridine
  modified_base 17: mod_base = um
  modified_base 18: mod_base = um
  modified_base 19: mod_base = gm
  modified_base 20: mod_base = OTHER; note = 2'-O-methyladenosine with a 3'-phosphorothioate linkage
  modified_base 21: mod_base = OTHER; note = 2'-O-methyladenosine with a 3'-phosphorothioate linkage
  modified_base 22: mod_base = OTHER; note = 2'-O-methylguanosine with a 3'-phosphorothioate linkage
  modified_base 23: mod_base = gm
ttagatgtcagctcgtttgaagg

SEQ ID NO: 649 - RNA, 23 nt, synthetic construct
  source 1..23: mol_type = other RNA
  modified_base 1: mod_base = OTHER; note = 2'-O-methyluridine with a 3'-phosphorothioate linkage
  modified_base 2: mod_base = OTHER; note = 2'-fluorouridine with a 3'-phosphorothioate linkage
  modified_base 3: mod_base = um
  modified_base 4: mod_base = gm
  modified_base 5: mod_base = OTHER; note = 2'-fluoroadenosine
  modified_base 6: mod_base = cm
  modified_base 7: mod_base = OTHER; note = 2'-fluoroadenosine
  modified_base 8: mod_base = cm
  modified_base 9: mod_base = OTHER; note = 2'-O-methyladenosine
  modified_base 10: mod_base = OTHER; note = 2'-O-methyladenosine
  modified_base 11: mod_base = OTHER; note = 2'-O-methyladenosine
  modified_base 12: mod_base = gm
  modified_base 13: mod_base = um
  modified_base 14: mod_base = OTHER; note = 2'-fluorouridine
  modified_base 15: mod_base = gm
  modified_base 16: mod_base = OTHER; note = 2'-fluoroadenosine
  modified_base 17: mod_base = gm
  modified_base 18: mod_base = OTHER; note = 2'-O-methyladenosine
  modified_base 19: mod_base = um
  modified_base 20: mod_base = OTHER; note = 2'-O-methyladenosine with a 3'-phosphorothioate linkage
  modified_base 21: mod_base = OTHER; note = 2'-O-methyluridine with a 3'-phosphorothioate linkage
  modified_base 22: mod_base = OTHER; note = 2'-O-methyladenosine with a 3'-phosphorothioate linkage
  modified_base 23: mod_base = gm
tttgacacaaagttgagatatag

SEQ ID NO: 650 - RNA, 23 nt, synthetic construct
  source 1..23: mol_type = other RNA
  modified_base 1: mod_base = OTHER; note = 2'-O-methyluridine with a 3'-phosphorothioate linkage
  modified_base 2: mod_base = OTHER; note = 2'-fluorocytidine with a 3'-phosphorothioate linkage
  modified_base 3: mod_base = OTHER; note = 2'-O-methyladenosine
  modified_base 4: mod_base = cm
  modified_base 5: mod_base = OTHER; note = 2'-fluoroadenosine
  modified_base 6: mod_base = um
  modified_base 7: mod_base = OTHER; note = 2'-fluorouridine
  modified_base 8: mod_base = cm
  modified_base 9: mod_base = OTHER; note = 2'-O-methyladenosine
  modified_base 10: mod_base = um
  modified_base 11: mod_base = um
  modified_base 12: mod_base = gm
  modified_base 13: mod_base = um
  modified_base 14: mod_base = OTHER; note = 2'-fluoroadenosine
  modified_base 15: mod_base = um
  modified_base 16: mod_base = OTHER; note = 2'-fluorocytidine
  modified_base 17: mod_base = OTHER; note = 2'-O-methyladenosine
  modified_base 18: mod_base = um
  modified_base 19: mod_base = cm
  modified_base 20: mod_base = OTHER; note = 2'-O-methyladenosine with a 3'-phosphorothioate linkage
  modified_base 21: mod_base = OTHER; note = 2'-O-methyladenosine with a 3'-phosphorothioate linkage
  modified_base 22: mod_base = OTHER; note = 2'-O-methylguanosine with a 3'-phosphorothioate linkage
  modified_base 23: mod_base = cm
tcacattcattgtatcatcaagc

SEQ ID NO: 651 - RNA, 23 nt, synthetic construct
  source 1..23: mol_type = other RNA
  modified_base 1: mod_base = OTHER; note = 2'-O-methyluridine with a 3'-phosphorothioate linkage
  modified_base 2: mod_base = OTHER; note = 2'-fluorouridine with a 3'-phosphorothioate linkage
  modified_base 3: mod_base = cm
  modified_base 4: mod_base = OTHER; note = 2'-O-methyladenosine
  modified_base 5: mod_base = OTHER; note = 2'-fluoroadenosine
  modified_base 6: mod_base = OTHER; note = 2'-O-methyladenosine
  modified_base 7: mod_base = OTHER; note = 2'-fluoroguanosine
  modified_base 8: mod_base = OTHER; note = 2'-O-methyladenosine
  modified_base 9: mod_base = um
  modified_base 10: mod_base = OTHER; note = 2'-O-methyladenosine
  modified_base 11: mod_base = um
  modified_base 12: mod_base = um
  modified_base 13: mod_base = cm
  modified_base 14: mod_base = OTHER; note = 2'-fluoroadenosine
  modified_base 15: mod_base = cm
  modified_base 16: mod_base = OTHER; note = 2'-fluoroadenosine
  modified_base 17: mod_base = um
  modified_base 18: mod_base = um
  modified_base 19: mod_base = cm
  modified_base 20: mod_base = OTHER; note = 2'-O-methyladenosine with a 3'-phosphorothioate linkage
  modified_base 21: mod_base = OTHER; note = 2'-O-methyluridine with a 3'-phosphorothioate linkage
  modified_base 22: mod_base = OTHER; note = 2'-O-methyluridine with a 3'-phosphorothioate linkage
  modified_base 23: mod_base = gm
ttcaaagatattcacattcattg

SEQ ID NO: 652 - RNA, 23 nt, synthetic construct
  source 1..23: mol_type = other RNA
  modified_base 1: mod_base = OTHER; note = 2'-O-methyluridine with a 3'-phosphorothioate linkage
  modified_base 2: mod_base = OTHER; note = 2'-fluorocytidine with a 3'-phosphorothioate linkage
  modified_base 3: mod_base = OTHER; note = 2'-O-methyladenosine
  modified_base 4: mod_base = um
  modified_base 5: mod_base = OTHER; note = 2'-fluorocytidine
  modified_base 6: mod_base = OTHER; note = 2'-O-methyladenosine
  modified_base 7: mod_base = OTHER; note = 2'-fluoroadenosine
  modified_base 8: mod_base = gm
  modified_base 9: mod_base = cm
  modified_base 10: mod_base = OTHER; note = 2'-O-methyladenosine
  modified_base 11: mod_base = um
  modified_base 12: mod_base = um
  modified_base 13: mod_base = um
  modified_base 14: mod_base = OTHER; note = 2'-fluorocytidine
  modified_base 15: mod_base = OTHER; note = 2'-O-methyladenosine
  modified_base 16: mod_base = OTHER; note = 2'-fluoroguanosine
  modified_base 17: mod_base = gm
  modified_base 18: mod_base = OTHER; note = 2'-O-methyladenosine
  modified_base 19: mod_base = gm
  modified_base 20: mod_base = OTHER; note = 2'-O-methylcytidine with a 3'-phosphorothioate linkage
  modified_base 21: mod_base = OTHER; note = 2'-O-methylcytidine with a 3'-phosphorothioate linkage
  modified_base 22: mod_base = OTHER; note = 2'-O-methyladenosine with a 3'-phosphorothioate linkage
  modified_base 23: mod_base = um
tcatcaagcatttcaggagccat

SEQ ID NO: 653 - RNA, 23 nt, synthetic construct
  source 1..23: mol_type = other RNA
  modified_base 1: mod_base = OTHER; note = 2'-O-methyluridine with a 3'-phosphorothioate linkage
  modified_base 2: mod_base = OTHER; note = 2'-fluoroadenosine with a 3'-phosphorothioate linkage
  modified_base 3: mod_base = OTHER; note = 2'-O-methyladenosine
  modified_base 4: mod_base = cm
  modified_base 5: mod_base = OTHER; note = 2'-O-methyladenosine
  modified_base 6: mod_base = OTHER; note = 2'-fluorouridine
  modified_base 7: mod_base = OTHER; note = 2'-O-methyladenosine
  modified_base 8: mod_base = OTHER; note = 2'-O-methyladenosine
  modified_base 9: mod_base = um
  modified_base 10: mod_base = um
  modified_base 11: mod_base = OTHER; note = 2'-O-methyladenosine
  modified_base 12: mod_base = um
  modified_base 13: mod_base = cm
  modified_base 14: mod_base = OTHER; note = 2'-fluoroadenosine
  modified_base 15: mod_base = um
  modified_base 16: mod_base = OTHER; note = 2'-fluorocytidine
  modified_base 17: mod_base = OTHER; note = 2'-O-methyladenosine
  modified_base 18: mod_base = um
  modified_base 19: mod_base = um
  modified_base 20: mod_base = OTHER; note = 2'-O-methyladenosine
  modified_base 21: mod_base = OTHER; note = 2'-O-methylguanosine with a 3'-phosphorothioate linkage
  modified_base 22: mod_base = OTHER; note = 2'-O-methylguanosine with a 3'-phosphorothioate linkage
  modified_base 23: mod_base = cm
taacataattatcatcattaggc

SEQ ID NO: 654 - RNA, 21 nt, synthetic construct
  source 1..21: mol_type = other RNA
  modified_base 1: mod_base = OTHER; note = 2'-O-methyladenosine with a 3'-phosphorothioate linkage and a 5' Cyclopropyl phosphate substitution
  modified_base 2: mod_base = OTHER; note = 2'-fluorouridine with a 3'-phosphorothioate linkage
  modified_base 3: mod_base = um
  modified_base 4: mod_base = gm
  modified_base 5: mod_base = um
  modified_base 6: mod_base = um
  modified_base 7: mod_base = OTHER; note = 2'-fluoroguanosine
  modified_base 8: mod_base = gm
  modified_base 9: mod_base = OTHER; note = 2'-O-methyladenosine
  modified_base 10: mod_base = OTHER; note = 2'-O-methyladenosine
  modified_base 11: mod_base = cm
  modified_base 12: mod_base = OTHER; note = 2'-fluorouridine
  modified_base 13: mod_base = OTHER; note = 2'-O-methyladenosine
  modified_base 14: mod_base = OTHER; note = 2'-fluorouridine
  modified_base 15: mod_base = gm
  modified_base 16: mod_base = OTHER; note = 2'-fluoroadenosine
  modified_base 17: mod_base = cm
  modified_base 18: mod_base = OTHER; note = 2'-O-methyladenosine
  modified_base 19: mod_base = gm
  modified_base 20: mod_base = OTHER; note = 2'-O-methyladenosine with a 3'-phosphorothioate linkage
  modified_base 21: mod_base = cm
attgttggaactatgacagac

SEQ ID NO: 655 - RNA, 23 nt, synthetic construct
  source 1..23: mol_type = other RNA
  modified_base 1: mod_base = OTHER; note = 2'-O-methyluridine with a 3'-phosphorothioate linkage
  modified_base 2: mod_base = OTHER; note = 2'-fluoroguanosine with a 3'-phosphorothioate linkage
  modified_base 3: mod_base = um
  modified_base 4: mod_base = OTHER; note = 2'-O-methyladenosine
  modified_base 5: mod_base = OTHER; note = 2'-fluorouridine
  modified_base 6: mod_base = cm
  modified_base 7: mod_base = OTHER; note = 2'-fluoroadenosine
  modified_base 8: mod_base = um
  modified_base 9: mod_base = cm
  modified_base 10: mod_base = OTHER; note = 2'-O-methyladenosine
  modified_base 11: mod_base = OTHER; note = 2'-O-methyladenosine
  modified_base 12: mod_base = gm
  modified_base 13: mod_base = cm
  modified_base 14: mod_base = OTHER; note = 2'-fluoroadenosine
  modified_base 15: mod_base = um
  modified_base 16: mod_base = OTHER; note = 2'-fluorouridine
  modified_base 17: mod_base = um
  modified_base 18: mod_base = cm
  modified_base 19: mod_base = OTHER; note = 2'-O-methyladenosine
  modified_base 20: mod_base = OTHER; note = 2'-O-methylguanosine with a 3'-phosphorothioate linkage
  modified_base 21: mod_base = OTHER; note = 2'-O-methylguanosine with a 3'-phosphorothioate linkage
  modified_base 22: mod_base = OTHER; note = 2'-O-methyladenosine with a 3'-phosphorothioate linkage
  modified_base 23: mod_base = gm
tgtatcatcaagcatttcaggag

SEQ ID NO: 656 - RNA, 23 nt, synthetic construct
  source 1..23: mol_type = other RNA
  modified_base 1: mod_base = OTHER; note = 2'-O-methyluridine with a 3'-phosphorothioate linkage
  modified_base 2: mod_base = OTHER; note = 2'-fluoroadenosine with a 3'-phosphorothioate linkage
  modified_base 3: mod_base = cm
  modified_base 4: mod_base = um
  modified_base 5: mod_base = OTHER; note = 2'-fluoroguanosine
  modified_base 6: mod_base = um
  modified_base 7: mod_base = OTHER; note = 2'-fluoroadenosine
  modified_base 8: mod_base = cm
  modified_base 9: mod_base = um
  modified_base 10: mod_base = gm
  modified_base 11: mod_base = um
  modified_base 12: mod_base = cm
  modified_base 13: mod_base = um
  modified_base 14: mod_base = OTHER; note = 2'-fluorouridine
  modified_base 15: mod_base = OTHER; note = 2'-O-methyladenosine
  modified_base 16: mod_base = OTHER; note = 2'-fluorouridine
  modified_base 17: mod_base = cm
  modified_base 18: mod_base = um
  modified_base 19: mod_base = um
  modified_base 20: mod_base = OTHER; note = 2'-O-methyluridine with a 3'-phosphorothioate linkage
  modified_base 21: mod_base = OTHER; note = 2'-O-methylguanosine with a 3'-phosphorothioate linkage
  modified_base 22: mod_base = OTHER; note = 2'-O-methyladenosine with a 3'-phosphorothioate linkage
  modified_base 23: mod_base = gm
tactgtactgtcttatctttgag

SEQ ID NO: 657 - RNA, 23 nt, synthetic construct
  source 1..23: mol_type = other RNA
  modified_base 1: mod_base = OTHER; note = 2'-O-methyluridine with a 3'-phosphorothioate linkage
  modified_base 2: mod_base = OTHER; note = 2'-fluoroadenosine with a 3'-phosphorothioate linkage
  modified_base 3: mod_base = cm
  modified_base 4: mod_base = OTHER; note = 2'-O-methyladenosine
  modified_base 5: mod_base = OTHER; note = 2'-fluorouridine
  modified_base 6: mod_base = OTHER; note = 2'-O-methyladenosine
  modified_base 7: mod_base = OTHER; note = 2'-fluoroadenosine
  modified_base 8: mod_base = OTHER; note = 2'-O-methyladenosine
  modified_base 9: mod_base = gm
  modified_base 10: mod_base = gm
  modified_base 11: mod_base = gm
  modified_base 12: mod_base = gm
  modified_base 13: mod_base = OTHER; note = 2'-O-methyladenosine
  modified_base 14: mod_base = OTHER; note = 2'-fluoroadenosine
  modified_base 15: mod_base = OTHER; note = 2'-O-methyladenosine
  modified_base 16: mod_base = OTHER; note = 2'-fluoroadenosine
  modified_base 17: mod_base = um
  modified_base 18: mod_base = gm
  modified_base 19: mod_base = gm
  modified_base 20: mod_base = OTHER; note = 2'-O-methyladenosine with a 3'-phosphorothioate linkage
  modified_base 21: mod_base = OTHER; note = 2'-O-methyladenosine with a 3'-phosphorothioate linkage
  modified_base 22: mod_base = OTHER; note = 2'-O-methyladenosine with a 3'-phosphorothioate linkage
  modified_base 23: mod_base = OTHER; note = 2'-O-methyladenosine
tacataaaggggaaaatggaaaa

SEQ ID NO: 658 - RNA, 23 nt, synthetic construct
  source 1..23: mol_type = other RNA
  modified_base 1: mod_base = OTHER; note = 2'-O-methyluridine with a 3'-phosphorothioate linkage
  modified_base 2: mod_base = OTHER; note = 2'-fluorouridine with a 3'-phosphorothioate linkage
  modified_base 3: mod_base = cm
  modified_base 4: mod_base = OTHER; note = 2'-O-methyladenosine
  modified_base 5: mod_base = OTHER; note = 2'-fluoroadenosine
  modified_base 6: mod_base = OTHER; note = 2'-O-methyladenosine
  modified_base 7: mod_base = OTHER; note = 2'-fluoroadenosine
  modified_base 8: mod_base = um
  modified_base 9: mod_base = OTHER; note = 2'-O-methyladenosine
  modified_base 10: mod_base = cm
  modified_base 11: mod_base = OTHER; note = 2'-O-methyladenosine
  modified_base 12: mod_base = um
  modified_base 13: mod_base = um
  modified_base 14: mod_base = OTHER; note = 2'-fluoroadenosine
  modified_base 15: mod_base = um
  modified_base 16: mod_base = OTHER; note = 2'-fluoroadenosine
  modified_base 17: mod_base = um
  modified_base 18: mod_base = gm
  modified_base 19: mod_base = cm
  modified_base 20: mod_base = OTHER; note = 2'-O-methyluridine with a 3'-phosphorothioate linkage
  modified_base 21: mod_base = OTHER; note = 2'-O-methyladenosine with a 3'-phosphorothioate linkage
  modified_base 22: mod_base = OTHER; note = 2'-O-methyladenosine with a 3'-phosphorothioate linkage
  modified_base 23: mod_base = cm
ttcaaaatacattatatgctaac

SEQ ID NO: 659 - RNA, 23 nt, synthetic construct
  source 1..23: mol_type = other RNA
  modified_base 1: mod_base = OTHER; note = 2'-O-methyluridine with a 3'-phosphorothioate linkage
  modified_base 2: mod_base = OTHER; note = 2'-fluorouridine with a 3'-phosphorothioate linkage
  modified_base 3: mod_base = cm
  modified_base 4: mod_base = OTHER; note = 2'-O-methyladenosine
  modified_base 5: mod_base = OTHER; note = 2'-fluoroadenosine
  modified_base 6: mod_base = OTHER; note = 2'-O-methyladenosine
  modified_base 7: mod_base = OTHER; note = 2'-fluorocytidine
  modified_base 8: mod_base = OTHER; note = 2'-O-methyladenosine
  modified_base 9: mod_base = um
  modified_base 10: mod_base = OTHER; note = 2'-O-methyladenosine
  modified_base 11: mod_base = um
  modified_base 12: mod_base = um
  modified_base 13: mod_base = cm
  modified_base 14: mod_base = OTHER; note = 2'-fluoroadenosine
  modified_base 15: mod_base = cm
  modified_base 16: mod_base = OTHER; note = 2'-fluoroadenosine
  modified_base 17: mod_base = um
  modified_base 18: mod_base = um
  modified_base 19: mod_base = cm
  modified_base 20: mod_base = OTHER; note = 2'-O-methyladenosine with a 3'-phosphorothioate linkage
  modified_base 21: mod_base = OTHER; note = 2'-O-methyluridine with a 3'-phosphorothioate linkage
  modified_base 22: mod_base = OTHER; note = 2'-O-methyluridine with a 3'-phosphorothioate linkage
  modified_base 23: mod_base = gm
ttcaaacatattcacattcattg

SEQ ID NO: 660 - RNA, 23 nt, synthetic construct
  source 1..23: mol_type = other RNA
  modified_base 1: mod_base = OTHER; note = 2'-O-methyluridine with a 3'-phosphorothioate linkage
  modified_base 2: mod_base = OTHER; note = 2'-fluorouridine with a 3'-phosphorothioate linkage
  modified_base 3: mod_base = cm
  modified_base 4: mod_base = OTHER; note = 2'-O-methyladenosine
  modified_base 5: mod_base = OTHER; note = 2'-fluoroadenosine
  modified_base 6: mod_base = OTHER; note = 2'-O-methyladenosine
  modified_base 7: mod_base = OTHER; note = 2'-fluoroinosine
  modified_base 8: mod_base = OTHER; note = 2'-O-methyladenosine
  modified_base 9: mod_base = um
  modified_base 10: mod_base = OTHER; note = 2'-O-methyladenosine
  modified_base 11: mod_base = um
  modified_base 12: mod_base = um
  modified_base 13: mod_base = cm
  modified_base 14: mod_base = OTHER; note = 2'-fluoroadenosine
  modified_base 15: mod_base = cm
  modified_base 16: mod_base = OTHER; note = 2'-fluoroadenosine
  modified_base 17: mod_base = um
  modified_base 18: mod_base = um
  modified_base 19: mod_base = cm
  modified_base 20: mod_base = OTHER; note = 2'-O-methyladenosine with a 3'-phosphorothioate linkage
  modified_base 21: mod_base = OTHER; note = 2'-O-methyluridine with a 3'-phosphorothioate linkage
  modified_base 22: mod_base = OTHER; note = 2'-O-methyluridine with a 3'-phosphorothioate linkage
  modified_base 23: mod_base = gm
ttcaaanatattcacattcattg

SEQ ID NO: 661 - RNA, 23 nt, synthetic construct
  source 1..23: mol_type = other RNA
  modified_base 1: mod_base = OTHER; note = 2'-O-methyluridine with a 3'-phosphorothioate linkage
  modified_base 2: mod_base = OTHER; note = 2'-fluorouridine with a 3'-phosphorothioate linkage
  modified_base 3: mod_base = cm
  modified_base 4: mod_base = OTHER; note = 2'-O-methyladenosine
  modified_base 5: mod_base = OTHER; note = 2'-fluoroadenosine
  modified_base 6: mod_base = OTHER; note = 2'-O-methyladenosine
  modified_base 7: mod_base = OTHER; note = 2'-fluoroguanosine
  modified_base 8: mod_base = OTHER; note = 2'-O-methyladenosine
  modified_base 9: mod_base = um
  modified_base 10: mod_base = OTHER; note = 2'-O-methyladenosine
  modified_base 11: mod_base = um
  modified_base 12: mod_base = um
  modified_base 13: mod_base = cm
  modified_base 14: mod_base = OTHER; note = 2'-fluoroadenosine
  modified_base 15: mod_base = cm
  modified_base 16: mod_base = OTHER; note = 2'-fluoroadenosine
  modified_base 17: mod_base = OTHER; note = 2'-O-methyladenosine
  modified_base 18: mod_base = um
  modified_base 19: mod_base = cm
  modified_base 20: mod_base = OTHER; note = 2'-O-methyladenosine with a 3'-phosphorothioate linkage
  modified_base 21: mod_base = OTHER; note = 2'-O-methyluridine with a 3'-phosphorothioate linkage
  modified_base 22: mod_base = OTHER; note = 2'-O-methyluridine with a 3'-phosphorothioate linkage
  modified_base 23: mod_base = gm
ttcaaagatattcacaatcattg

SEQ ID NO: 662 - RNA, 21 nt, synthetic construct
  source 1..21: mol_type = other RNA
  modified_base 1: mod_base = OTHER; note = 2'-O-methyluridine with a 3'-phosphorothioate linkage
  modified_base 2: mod_base = OTHER; note = 2'-fluoroadenosine with a 3'-phosphorothioate linkage
  modified_base 3: mod_base = cm
  modified_base 4: mod_base = OTHER; note = 2'-O-methyladenosine
  modified_base 5: mod_base = OTHER; note = 2'-fluorouridine
  modified_base 6: mod_base = OTHER; note = 2'-O-methyladenosine
  modified_base 7: mod_base = OTHER; note = 2'-fluoroadenosine
  modified_base 8: mod_base = OTHER; note = 2'-O-methyladenosine
  modified_base 9: mod_base = gm
  modified_base 10: mod_base = gm
  modified_base 11: mod_base = gm
  modified_base 12: mod_base = gm
  modified_base 13: mod_base = OTHER; note = 2'-O-methyladenosine
  modified_base 14: mod_base = OTHER; note = 2'-fluoroadenosine
  modified_base 15: mod_base = OTHER; note = 2'-O-methyladenosine
  modified_base 16: mod_base = OTHER; note = 2'-fluoroadenosine
  modified_base 17: mod_base = um
  modified_base 18: mod_base = OTHER; note = 2'-O-methylguanosine with a 3'-phosphorothioate linkage
  modified_base 19: mod_base = OTHER; note = 2'-O-methylguanosine with a 3'-phosphorothioate linkage
  modified_base 20: mod_base = OTHER; note = 2'-O-methyladenosine with a 3'-phosphorothioate linkage
  modified_base 21: mod_base = OTHER; note = 2'-O-methyladenosine
tacataaaggggaaaatggaa

SEQ ID NO: 663 - RNA, 23 nt, synthetic construct
  source 1..23: mol_type = other RNA
  modified_base 1: mod_base = OTHER; note = 2'-O-methyluridine with a 3'-phosphorothioate linkage
  modified_base 2: mod_base = OTHER; note = 2'-fluorocytidine with a 3'-phosphorothioate linkage
  modified_base 3: mod_base = OTHER; note = 2'-O-methyladenosine
  modified_base 4: mod_base = um
  modified_base 5: mod_base = cm
  modified_base 6: mod_base = OTHER; note = 2'-O-methyladenosine
  modified_base 7: mod_base = OTHER; note = 2'-O-methyladenosine
  modified_base 8: mod_base = gm
  modified_base 9: mod_base = cm
  modified_base 10: mod_base = OTHER; note = 2'-O-methyladenosine
  modified_base 11: mod_base = um
  modified_base 12: mod_base = um
  modified_base 13: mod_base = um
  modified_base 14: mod_base = OTHER; note = 2'-fluorocytidine
  modified_base 15: mod_base = OTHER; note = 2'-O-methyladenosine
  modified_base 16: mod_base = OTHER; note = 2'-fluoroguanosine
  modified_base 17: mod_base = gm
  modified_base 18: mod_base = OTHER; note = 2'-O-methyladenosine
  modified_base 19: mod_base = gm
  modified_base 20: mod_base = OTHER; note = 2'-O-methylcytidine with a 3'-phosphorothioate linkage
  modified_base 21: mod_base = OTHER; note = 2'-O-methylcytidine with a 3'-phosphorothioate linkage
  modified_base 22: mod_base = OTHER; note = 2'-O-methyladenosine with a 3'-phosphorothioate linkage
  modified_base 23: mod_base = um
tcatcaagcatttcaggagccat

SEQ ID NO: 664 - RNA, 23 nt, synthetic construct
  source 1..23: mol_type = other RNA
  modified_base 1: mod_base = OTHER; note = 2'-O-methyluridine with a 3'-phosphorothioate linkage
  modified_base 2: mod_base = OTHER; note = 2'-fluorocytidine with a 3'-phosphorothioate linkage
  modified_base 3: mod_base = OTHER; note = 2'-O-methyladenosine
  modified_base 4: mod_base = um
  modified_base 5: mod_base = OTHER; note = 2'-fluorocytidine
  modified_base 6: mod_base = OTHER; note = Unlocked adenosine
  modified_base 7: mod_base = OTHER; note = 2'-fluoroadenosine
  modified_base 8: mod_base = gm
  modified_base 9: mod_base = cm
  modified_base 10: mod_base = OTHER; note = 2'-O-methyladenosine
  modified_base 11: mod_base = um
  modified_base 12: mod_base = um
  modified_base 13: mod_base = um
  modified_base 14: mod_base = OTHER; note = 2'-fluorocytidine
  modified_base 15: mod_base = OTHER; note = 2'-O-methyladenosine
  modified_base 16: mod_base = OTHER; note = 2'-fluoroguanosine
  modified_base 17: mod_base = gm
  modified_base 18: mod_base = OTHER; note = 2'-O-methyladenosine
  modified_base 19: mod_base = gm
  modified_base 20: mod_base = OTHER; note = 2'-O-methylcytidine with a 3'-phosphorothioate linkage
  modified_base 21: mod_base = OTHER; note = 2'-O-methylcytidine with a 3'-phosphorothioate linkage
  modified_base 22: mod_base = OTHER; note = 2'-O-methyladenosine with a 3'-phosphorothioate linkage
  modified_base 23: mod_base = um
tcatcaagcatttcaggagccat

SEQ ID NO: 665 - RNA, 23 nt, synthetic construct
  source 1..23: mol_type = other RNA
  modified_base 1: mod_base = OTHER; note = 2'-O-methyluridine with a 3'-phosphorothioate linkage
  modified_base 2: mod_base = OTHER; note = 2'-fluorocytidine with a 3'-phosphorothioate linkage
  modified_base 3: mod_base = OTHER; note = 2'-O-methyladenosine
  modified_base 4: mod_base = um
  modified_base 5: mod_base = OTHER; note = 2'-fluorocytidine
  modified_base 6: mod_base = OTHER; note = 2'-O-methyladenosine
  modified_base 7: mod_base = OTHER; note = Unlocked adenosine
  modified_base 8: mod_base = gm
  modified_base 9: mod_base = cm
  modified_base 10: mod_base = OTHER; note = 2'-O-methyladenosine
  modified_base 11: mod_base = um
  modified_base 12: mod_base = um
  modified_base 13: mod_base = um
  modified_base 14: mod_base = OTHER; note = 2'-fluorocytidine
  modified_base 15: mod_base = OTHER; note = 2'-O-methyladenosine
  modified_base 16: mod_base = OTHER; note = 2'-fluoroguanosine
  modified_base 17: mod_base = gm
  modified_base 18: mod_base = OTHER; note = 2'-O-methyladenosine
  modified_base 19: mod_base = gm
  modified_base 20: mod_base = OTHER; note = 2'-O-methylcytidine with a 3'-phosphorothioate linkage
  modified_base 21: mod_base = OTHER; note = 2'-O-methylcytidine with a 3'-phosphorothioate linkage
  modified_base 22: mod_base = OTHER; note = 2'-O-methyladenosine with a 3'-phosphorothioate linkage
  modified_base 23: mod_base = um
tcatcaagcatttcaggagccat

SEQ ID NO: 666 - RNA, 23 nt, synthetic construct
  source 1..23: mol_type = other RNA
  modified_base 1: mod_base = OTHER; note = 2'-O-methyluridine with a 3'-phosphorothioate linkage
  modified_base 2: mod_base = OTHER; note = 2'-fluorocytidine with a 3'-phosphorothioate linkage
  modified_base 3: mod_base = OTHER; note = 2'-O-methyladenosine
  modified_base 4: mod_base = um
  modified_base 5: mod_base = OTHER; note = 2'-fluorocytidine
  modified_base 6: mod_base = OTHER; note = 2'-O-methyladenosine
  modified_base 7: mod_base = OTHER; note = 2'-fluoroinosine
  modified_base 8: mod_base = gm
  modified_base 9: mod_base = cm
  modified_base 10: mod_base = OTHER; note = 2'-O-methyladenosine
  modified_base 11: mod_base = um
  modified_base 12: mod_base = um
  modified_base 13: mod_base = um
  modified_base 14: mod_base = OTHER; note = 2'-fluorocytidine
  modified_base 15: mod_base = OTHER; note = 2'-O-methyladenosine
  modified_base 16: mod_base = OTHER; note = 2'-fluoroguanosine
  modified_base 17: mod_base = gm
  modified_base 18: mod_base = OTHER; note = 2'-O-methyladenosine
  modified_base 19: mod_base = gm
  modified_base 20: mod_base = OTHER; note = 2'-O-methylcytidine with a 3'-phosphorothioate linkage
  modified_base 21: mod_base = OTHER; note = 2'-O-methylcytidine with a 3'-phosphorothioate linkage
  modified_base 22: mod_base = OTHER; note = 2'-O-methyladenosine with a 3'-phosphorothioate linkage
  modified_base 23: mod_base = um
tcatcangcatttcaggagccat

SEQ ID NO: 667 - RNA, 23 nt, synthetic construct
  source 1..23: mol_type = other RNA
  modified_base 1: mod_base = OTHER; note = 2'-O-methyluridine with a 3'-phosphorothioate linkage
  modified_base 2: mod_base = OTHER; note = 2'-fluoroadenosine with a 3'-phosphorothioate linkage
  modified_base 3: mod_base = gm
  modified_base 4: mod_base = OTHER; note = 2'-O-methyladenosine
  modified_base 5: mod_base = OTHER; note = 2'-fluoroguanosine
  modified_base 6: mod_base = OTHER; note = 2'-O-methyladenosine
  modified_base 7: mod_base = OTHER; note = 2'-fluorouridine
  modified_base 8: mod_base = um
  modified_base 9: mod_base = um
  modified_base 10: mod_base = cm
  modified_base 11: mod_base = um
  modified_base 12: mod_base = um
  modified_base 13: mod_base = um
  modified_base 14: mod_base = OTHER; note = 2'-fluorouridine
  modified_base 15: mod_base = um
  modified_base 16: mod_base = OTHER; note = 2'-fluoroadenosine
  modified_base 17: mod_base = OTHER; note = 2'-O-methyladenosine
  modified_base 18: mod_base = cm
  modified_base 19: mod_base = OTHER; note = 2'-O-methyladenosine
  modified_base 20: mod_base = OTHER; note = 2'-O-methyluridine with a 3'-phosphorothioate linkage
  modified_base 21: mod_base = OTHER; note = 2'-O-methyladenosine with a 3'-phosphorothioate linkage
  modified_base 22: mod_base = OTHER; note = 2'-O-methyladenosine with a 3'-phosphorothioate linkage
  modified_base 23: mod_base = um
tagagatttctttttaacataat

SEQ ID NO: 668 - RNA, 23 nt, synthetic construct
  source 1..23: mol_type = other RNA
  modified_base 1: mod_base = OTHER; note = 2'-O-methyluridine with a 3'-phosphorothioate linkage
  modified_base 2: mod_base = OTHER; note = 2'-fluoroadenosine with a 3'-phosphorothioate linkage
  modified_base 3: mod_base = OTHER; note = 2'-O-methyladenosine
  modified_base 4: mod_base = OTHER; note = 2'-O-methyladenosine
  modified_base 5: mod_base = OTHER; note = 2'-fluorouridine
  modified_base 6: mod_base = gm
  modified_base 7: mod_base = OTHER; note = 2'-fluoroguanosine
  modified_base 8: mod_base = OTHER; note = 2'-O-methyladenosine
  modified_base 9: mod_base = OTHER; note = 2'-O-methyladenosine
  modified_base 10: mod_base = OTHER; note = 2'-O-methyladenosine
  modified_base 11: mod_base = OTHER; note = 2'-O-methyladenosine
  modified_base 12: mod_base = gm
  modified_base 13: mod_base = OTHER; note = 2'-O-methyladenosine
  modified_base 14: mod_base = OTHER; note = 2'-fluoroadenosine
  modified_base 15: mod_base = OTHER; note = 2'-O-methyladenosine
  modified_base 16: mod_base = OTHER; note = 2'-fluoroguanosine
  modified_base 17: mod_base = cm
  modified_base 18: mod_base = um
  modified_base 19: mod_base = OTHER; note = 2'-O-methyladenosine
  modified_base 20: mod_base = um
  modified_base 21: mod_base = OTHER; note = 2'-O-methylguanosine with a 3'-phosphorothioate linkage
  modified_base 22: mod_base = OTHER; note = 2'-O-methyladenosine with a 3'-phosphorothioate linkage
  modified_base 23: mod_base = gm
taaatggaaaagaaagctatgag

SEQ ID NO: 669 - RNA, 23 nt, synthetic construct
  source 1..23: mol_type = other RNA
  modified_base 1: mod_base = OTHER; note = 2'-O-methyluridine with a 3'-phosphorothioate linkage
  modified_base 2: mod_base = OTHER; note = 2'-fluoroadenosine with a 3'-phosphorothioate linkage
  modified_base 3: mod_base = OTHER; note = 2'-O-methyladenosine
  modified_base 4: mod_base = OTHER; note = 2'-O-methyladenosine
  modified_base 5: mod_base = OTHER; note = 2'-fluorouridine
  modified_base 6: mod_base = gm
  modified_base 7: mod_base = OTHER; note = 2'-fluoroguanosine
  modified_base 8: mod_base = OTHER; note = 2'-O-methyladenosine
  modified_base 9: mod_base = OTHER; note = 2'-O-methyladenosine
  modified_base 10: mod_base = OTHER; note = 2'-O-methyladenosine
  modified_base 11: mod_base = OTHER; note = 2'-O-methyladenosine
  modified_base 12: mod_base = gm
  modified_base 13: mod_base = OTHER; note = 2'-O-methyladenosine
  modified_base 14: mod_base = OTHER; note = 2'-fluoroadenosine
  modified_base 15: mod_base = OTHER; note = 2'-O-methyladenosine
  modified_base 16: mod_base = OTHER; note = 2'-fluoroguanosine
  modified_base 17: mod_base = cm
  modified_base 18: mod_base = um
  modified_base 19: mod_base = OTHER; note = 2'-O-methyladenosine
  modified_base 20: mod_base = OTHER; note = 2'-O-methyluridine with a 3'-phosphorothioate linkage
  modified_base 21: mod_base = OTHER; note = 2'-O-methylguanosine with a 3'-phosphorothioate linkage
  modified_base 22: mod_base = OTHER; note = 2'-O-methyladenosine with a 3'-phosphorothioate linkage
  modified_base 23: mod_base = gm
taaatggaaaagaaagctatgag

SEQ ID NO: 670 - RNA, 23 nt, synthetic construct
  source 1..23: mol_type = other RNA
  modified_base 1: mod_base = OTHER; note = 2'-O-methyluridine with a 3'-phosphorothioate linkage
  modified_base 2: mod_base = OTHER; note = 2'-fluorocytidine with a 3'-phosphorothioate linkage
  modified_base 3: mod_base = OTHER; note = 2'-O-methyladenosine
  modified_base 4: mod_base = cm
  modified_base 5: mod_base = OTHER; note = 2'-O-methyladenosine
  modified_base 6: mod_base = um
  modified_base 7: mod_base = um
  modified_base 8: mod_base = cm
  modified_base 9: mod_base = OTHER; note = 2'-O-methyladenosine
  modified_base 10: mod_base = um
  modified_base 11: mod_base = um
  modified_base 12: mod_base = gm
  modified_base 13: mod_base = um
  modified_base 14: mod_base = OTHER; note = 2'-fluoroadenosine
  modified_base 15: mod_base = um
  modified_base 16: mod_base = OTHER; note = 2'-fluorocytidine
  modified_base 17: mod_base = OTHER; note = 2'-O-methyladenosine
  modified_base 18: mod_base = um
  modified_base 19: mod_base = cm
  modified_base 20: mod_base = OTHER; note = 2'-O-methyladenosine with a 3'-phosphorothioate linkage
  modified_base 21: mod_base = OTHER; note = 2'-O-methyladenosine with a 3'-phosphorothioate linkage
  modified_base 22: mod_base = OTHER; note = 2'-O-methylguanosine with a 3'-phosphorothioate linkage
  modified_base 23: mod_base = cm
tcacattcattgtatcatcaagc

SEQ ID NO: 671 - RNA, 23 nt, synthetic construct
  source 1..23: mol_type = other RNA
  modified_base 1: mod_base = OTHER; note = 2'-O-methyluridine with a 3'-phosphorothioate linkage
  modified_base 2: mod_base = OTHER; note = 2'-fluorocytidine with a 3'-phosphorothioate linkage
  modified_base 3: mod_base = OTHER; note = 2'-O-methyladenosine
  modified_base 4: mod_base = cm
  modified_base 5: mod_base = OTHER; note = 2'-fluoroadenosine
  modified_base 6: mod_base = OTHER; note = Unlocked uridine
  modified_base 7: mod_base = OTHER; note = 2'-fluorouridine
  modified_base 8: mod_base = cm
  modified_base 9: mod_base = OTHER; note = 2'-O-methyladenosine
  modified_base 10: mod_base = um
  modified_base 11: mod_base = um
  modified_base 12: mod_base = gm
  modified_base 13: mod_base = um
  modified_base 14: mod_base = OTHER; note = 2'-fluoroadenosine
  modified_base 15: mod_base = um
  modified_base 16: mod_base = OTHER; note = 2'-fluorocytidine
  modified_base 17: mod_base = OTHER; note = 2'-O-methyladenosine
  modified_base 18: mod_base = um
  modified_base 19: mod_base = cm
  modified_base 20: mod_base = OTHER; note = 2'-O-methyladenosine with a 3'-phosphorothioate linkage
  modified_base 21: mod_base = OTHER; note = 2'-O-methyladenosine with a 3'-phosphorothioate linkage
  modified_base 22: mod_base = OTHER; note = 2'-O-methylguanosine with a 3'-phosphorothioate linkage
  modified_base 23: mod_base = cm
tcacattcattgtatcatcaagc

SEQ ID NO: 672 - RNA, 23 nt, synthetic construct
  source 1..23: mol_type = other RNA
  modified_base 1: mod_base = OTHER; note = 2'-O-methyluridine with a 3'-phosphorothioate linkage
  modified_base 2: mod_base = OTHER; note = 2'-fluorocytidine with a 3'-phosphorothioate linkage
  modified_base 3: mod_base = OTHER; note = 2'-O-methyladenosine
  modified_base 4: mod_base = cm
  modified_base 5: mod_base = OTHER; note = 2'-fluoroadenosine
  modified_base 6: mod_base = um
  modified_base 7: mod_base = OTHER; note = Unlocked uridine
  modified_base 8: mod_base = cm
  modified_base 9: mod_base = OTHER; note = 2'-O-methyladenosine
  modified_base 10: mod_base = um
  modified_base 11: mod_base = um
  modified_base 12: mod_base = gm
  modified_base 13: mod_base = um
  modified_base 14: mod_base = OTHER; note = 2'-fluoroadenosine
  modified_base 15: mod_base = um
  modified_base 16: mod_base = OTHER; note = 2'-fluorocytidine
  modified_base 17: mod_base = OTHER; note = 2'-O-methyladenosine
  modified_base 18: mod_base = um
  modified_base 19: mod_base = cm
  modified_base 20: mod_base = OTHER; note = 2'-O-methyladenosine with a 3'-phosphorothioate linkage
  modified_base 21: mod_base = OTHER; note = 2'-O-methyladenosine with a 3'-phosphorothioate linkage
  modified_base 22: mod_base = OTHER; note = 2'-O-methylguanosine with a 3'-phosphorothioate linkage
  modified_base 23: mod_base = cm
tcacattcattgtatcatcaagc

SEQ ID NO: 673 - RNA, 23 nt, synthetic construct
  source 1..23: mol_type = other RNA
  modified_base 1: mod_base = OTHER; note = 2'-O-methyluridine with a 3'-phosphorothioate linkage
  modified_base 2: mod_base = OTHER; note = 2'-fluorocytidine with a 3'-phosphorothioate linkage
  modified_base 3: mod_base = OTHER; note = 2'-O-methyladenosine
  modified_base 4: mod_base = cm
  modified_base 5: mod_base = OTHER; note = 2'-fluoroadenosine
  modified_base 6: mod_base = um
  modified_base 7: mod_base = OTHER; note = 2'-fluoroinosine
  modified_base 8: mod_base = cm
  modified_base 9: mod_base = OTHER; note = 2'-O-methyladenosine
  modified_base 10: mod_base = um
  modified_base 11: mod_base = um
  modified_base 12: mod_base = gm
  modified_base 13: mod_base = um
  modified_base 14: mod_base = OTHER; note = 2'-fluoroadenosine
  modified_base 15: mod_base = um
  modified_base 16: mod_base = OTHER; note = 2'-fluorocytidine
  modified_base 17: mod_base = OTHER; note = 2'-O-methyladenosine
  modified_base 18: mod_base = um
  modified_base 19: mod_base = cm
  modified_base 20: mod_base = OTHER; note = 2'-O-methyladenosine with a 3'-phosphorothioate linkage
  modified_base 21: mod_base = OTHER; note = 2'-O-methyladenosine with a 3'-phosphorothioate linkage
  modified_base 22: mod_base = OTHER; note = 2'-O-methylguanosine with a 3'-phosphorothioate linkage
  modified_base 23: mod_base = cm
tcacatncattgtatcatcaagc

SEQ ID NO: 674 - RNA, 23 nt, synthetic construct
  source 1..23: mol_type = other RNA
  modified_base 1: mod_base = OTHER; note = 2'-O-methyluridine with a 3'-phosphorothioate linkage
  modified_base 2: mod_base = OTHER; note = 2'-fluorouridine with a 3'-phosphorothioate linkage
  modified_base 3: mod_base = OTHER; note = 2'-O-methyladenosine
  modified_base 4: mod_base = gm
  modified_base 5: mod_base = OTHER; note = 2'-fluoroadenosine
  modified_base 6: mod_base = um
  modified_base 7: mod_base = OTHER; note = 2'-fluorocytidine
  modified_base 8: mod_base = um
  modified_base 9: mod_base = cm
  modified_base 10: mod_base = OTHER; note = 2'-O-methyladenosine
  modified_base 11: mod_base = gm
  modified_base 12: mod_base = cm
  modified_base 13: mod_base = um
  modified_base 14: mod_base = OTHER; note = 2'-fluorocytidine
  modified_base 15: mod_base = gm
  modified_base 16: mod_base = OTHER; note = 2'-fluorouridine
  modified_base 17: mod_base = um
  modified_base 18: mod_base = um
  modified_base 19: mod_base = gm
  modified_base 20: mod_base = OTHER; note = 2'-O-methyladenosine with a 3'-phosphorothioate linkage
  modified_base 21: mod_base = OTHER; note = 2'-O-methyladenosine with a 3'-phosphorothioate linkage
  modified_base 22: mod_base = OTHER; note = 2'-O-methylguanosine with a 3'-phosphorothioate linkage
  modified_base 23: mod_base = gm
ttagatctcagctcgtttgaagg

SEQ ID NO: 675 - RNA, 23 nt, synthetic construct
  source 1..23: mol_type = other RNA
  modified_base 1: mod_base = OTHER; note = 2'-O-methyluridine with a 3'-phosphorothioate linkage
  modified_base 2: mod_base = OTHER; note = 2'-fluorouridine with a 3'-phosphorothioate linkage
  modified_base 3: mod_base = OTHER; note = 2'-O-methyladenosine
  modified_base 4: mod_base = gm
  modified_base 5: mod_base = OTHER; note = 2'-fluoroadenosine
  modified_base 6: mod_base = um
  modified_base 7: mod_base = OTHER; note = 2'-fluoroguanosine
  modified_base 8: mod_base = um
  modified_base 9: mod_base = cm
  modified_base 10: mod_base = OTHER; note = 2'-O-methyladenosine
  modified_base 11: mod_base = gm
  modified_base 12: mod_base = cm
  modified_base 13: mod_base = um
  modified_base 14: mod_base = OTHER; note = 2'-fluorocytidine
  modified_base 15: mod_base = gm
  modified_base 16: mod_base = OTHER; note = 2'-fluorouridine
  modified_base 17: mod_base = OTHER; note = 2'-O-methyladenosine
  modified_base 18: mod_base = um
  modified_base 19: mod_base = gm
  modified_base 20: mod_base = OTHER; note = 2'-O-methyladenosine with a 3'-phosphorothioate linkage
  modified_base 21: mod_base = OTHER; note = 2'-O-methyladenosine with a 3'-phosphorothioate linkage
  modified_base 22: mod_base = OTHER; note = 2'-O-methylguanosine with a 3'-phosphorothioate linkage
  modified_base 23: mod_base = gm
ttagatgtcagctcgtatgaagg

SEQ ID NO: 676 - RNA, 23 nt, synthetic construct
  source 1..23: mol_type = other RNA
  modified_base 1: mod_base = OTHER; note = 2'-O-methyluridine with a 3'-phosphorothioate linkage
  modified_base 2: mod_base = OTHER; note = 2'-fluorouridine with a 3'-phosphorothioate linkage
  modified_base 3: mod_base = OTHER; note = 2'-O-methyladenosine
  modified_base 4: mod_base = gm
  modified_base 5: mod_base = OTHER; note = 2'-fluoroadenosine
  modified_base 6: mod_base = um
  modified_base 7: mod_base = OTHER; note = 2'-fluoroinosine
  modified_base 8: mod_base = um
  modified_base 9: mod_base = cm
  modified_base 10: mod_base = OTHER; note = 2'-O-methyladenosine
  modified_base 11: mod_base = gm
  modified_base 12: mod_base = cm
  modified_base 13: mod_base = um
  modified_base 14: mod_base = OTHER; note = 2'-fluorocytidine
  modified_base 15: mod_base = gm
  modified_base 16: mod_base = OTHER; note = 2'-fluorouridine
  modified_base 17: mod_base = um
  modified_base 18: mod_base = um
  modified_base 19: mod_base = gm
  modified_base 20: mod_base = OTHER; note = 2'-O-methyladenosine with a 3'-phosphorothioate linkage
  modified_base 21: mod_base = OTHER; note = 2'-O-methyladenosine with a 3'-phosphorothioate linkage
  modified_base 22: mod_base = OTHER; note = 2'-O-methylguanosine with a 3'-phosphorothioate linkage
  modified_base 23: mod_base = gm
ttagatntcagctcgtttgaagg

SEQ ID NO: 677 - RNA, 21 nt, synthetic construct
  source 1..21: mol_type = other RNA
  modified_base 1: mod_base = OTHER; note = 2'-O-methyluridine with a 3'-phosphorothioate linkage
  modified_base 2: mod_base = OTHER; note = 2'-fluorouridine with a 3'-phosphorothioate linkage
  modified_base 3: mod_base = um
  modified_base 4: mod_base = gm
  modified_base 5: mod_base = OTHER; note = 2'-fluoroadenosine
  modified_base 6: mod_base = cm
  modified_base 7: mod_base = OTHER; note = 2'-fluoroadenosine
  modified_base 8: mod_base = cm
  modified_base 9: mod_base = OTHER; note = 2'-O-methyladenosine
  modified_base 10: mod_base = OTHER; note = 2'-O-methyladenosine
  modified_base 11: mod_base = OTHER; note = 2'-O-methyladenosine
  modified_base 12: mod_base = gm
  modified_base 13: mod_base = um
  modified_base 14: mod_base = OTHER; note = 2'-fluorouridine
  modified_base 15: mod_base = gm
  modified_base 16: mod_base = OTHER; note = 2'-fluoroadenosine
  modified_base 17: mod_base = gm
  modified_base 18: mod_base = OTHER; note = 2'-O-methyladenosine with a 3'-phosphorothioate linkage
  modified_base 19: mod_base = OTHER; note = 2'-O-methyluridine with a 3'-phosphorothioate linkage
  modified_base 20: mod_base = OTHER; note = 2'-O-methyladenosine with a 3'-phosphorothioate linkage
  modified_base 21: mod_base = um
tttgacacaaagttgagatat

SEQ ID NO: 678 - RNA, 22 nt, synthetic construct
  source 1..22: mol_type = other RNA
  modified_base 1: mod_base = OTHER; note = 2'-O-methyluridine with a 3'-phosphorothioate linkage
  modified_base 2: mod_base = OTHER; note = 2'-fluorouridine with a 3'-phosphorothioate linkage
  modified_base 3: mod_base = um
  modified_base 4: mod_base = gm
  modified_base 5: mod_base = OTHER; note = 2'-fluoroadenosine
  modified_base 6: mod_base = cm
  modified_base 7: mod_base = OTHER; note = 2'-fluoroadenosine
  modified_base 8: mod_base = cm
  modified_base 9: mod_base = OTHER; note = 2'-O-methyladenosine
  modified_base 10: mod_base = OTHER; note = 2'-O-methyladenosine
  modified_base 11: mod_base = OTHER; note = 2'-O-methyladenosine
  modified_base 12: mod_base = gm
  modified_base 13: mod_base = um
  modified_base 14: mod_base = OTHER; note = 2'-fluorouridine
  modified_base 15: mod_base = gm
  modified_base 16: mod_base = OTHER; note = 2'-fluoroadenosine
  modified_base 17: mod_base = gm
  modified_base 18: mod_base = OTHER; note = 2'-O-methyladenosine
  modified_base 19: mod_base = OTHER; note = 2'-O-methyluridine with a 3'-phosphorothioate linkage
  modified_base 20: mod_base = OTHER; note = 2'-O-methyladenosine with a 3'-phosphorothioate linkage
  modified_base 21: mod_base = OTHER; note = 2'-O-methyluridine with a 3'-phosphorothioate linkage
  modified_base 22: mod_base = OTHER; note = 2'-O-methyladenosine
tttgacacaaagttgagatata

SEQ ID NO: 679 - RNA, 23 nt, synthetic construct
  source 1..23: mol_type = other RNA
  modified_base 1: mod_base = OTHER; note = 2'-O-methyluridine with a 3'-phosphorothioate linkage
  modified_base 2: mod_base = OTHER; note = 2'-fluorouridine with a 3'-phosphorothioate linkage
  modified_base 3: mod_base = um
  modified_base 4: mod_base = gm
  modified_base 5: mod_base = OTHER; note = 2'-fluoroadenosine
  modified_base 6: mod_base = cm
  modified_base 7: mod_base = OTHER; note = 2'-fluoroadenosine
  modified_base 8: mod_base = cm
  modified_base 9: mod_base = OTHER; note = 2'-O-methyladenosine
  modified_base 10: mod_base = OTHER; note = 2'-O-methyladenosine
  modified_base 11: mod_base = OTHER; note = 2'-O-methyladenosine
  modified_base 12: mod_base = gm
  modified_base 13: mod_base = um
  modified_base 14: mod_base = OTHER; note = 2'-fluorouridine
  modified_base 15: mod_base = gm
  modified_base 16: mod_base = OTHER; note = 2'-fluoroadenosine
  modified_base 17: mod_base = gm
  modified_base 18: mod_base = OTHER; note = 2'-O-methyladenosine
  modified_base 19: mod_base = OTHER; note = 2'-O-methyluridine with a 3' phosphoryl guanidine linkage
  modified_base 20: mod_base = OTHER; note = 2'-O-methyladenosine with a 3' phosphoryl guanidine linkage
  modified_base 21: mod_base = OTHER; note = 2'-O-methyluridine with a 3'-phosphorothioate linkage
  modified_base 22: mod_base = OTHER; note = 2'-O-methyladenosine with a 3'-phosphorothioate linkage
  modified_base 23: mod_base = gm
tttgacacaaagttgagatatag

SEQ ID NO: 680 - RNA, 23 nt, synthetic construct
  source 1..23: mol_type = other RNA
  modified_base 1: mod_base = OTHER; note = 2'-O-methyluridine with a 3'-phosphorothioate linkage
  modified_base 2: mod_base = OTHER; note = 2'-fluorocytidine with a 3'-phosphorothioate linkage
  modified_base 3: mod_base = OTHER; note = 2'-O-methyladenosine
  modified_base 4: mod_base = cm
  modified_base 5: mod_base = OTHER; note = 2'-fluorouridine
  modified_base 6: mod_base = OTHER; note = 2'-O-methyladenosine
  modified_base 7: mod_base = OTHER; note = 2'-fluoroadenosine
  modified_base 8: mod_base = gm
  modified_base 9: mod_base = OTHER; note = 2'-O-methyladenosine
  modified_base 10: mod_base = um
  modified_base 11: mod_base = OTHER; note = 2'-O-methyladenosine
  modified_base 12: mod_base = um
  modified_base 13: mod_base = um
  modified_base 14: mod_base = OTHER; note = 2'-fluorocytidine
  modified_base 15: mod_base = um
  modified_base 16: mod_base = OTHER; note = 2'-fluorouridine
  modified_base 17: mod_base = um
  modified_base 18: mod_base = gm
  modified_base 19: mod_base = OTHER; note = 2'-O-methyladenosine
  modified_base 20: mod_base = OTHER; note = 2'-O-methyluridine with a 3'-phosphorothioate linkage
  modified_base 21: mod_base = OTHER; note = 2'-O-methyluridine with a 3'-phosphorothioate linkage
  modified_base 22: mod_base = OTHER; note = 2'-O-methyluridine with a 3'-phosphorothioate linkage
  modified_base 23: mod_base = um
tcactaagatattctttgatttt

SEQ ID NO: 681 - RNA, 23 nt, synthetic construct
  source 1..23: mol_type = other RNA
  modified_base 1: mod_base = OTHER; note = 2'-O-methyluridine with a 3'-phosphorothioate linkage
  modified_base 2: mod_base = OTHER; note = 2'-fluorocytidine with a 3'-phosphorothioate linkage
  modified_base 3: mod_base = OTHER; note = 2'-O-methyladenosine
  modified_base 4: mod_base = cm
  modified_base 5: mod_base = OTHER; note = 2'-fluorouridine
  modified_base 6: mod_base = OTHER; note = 2'-O-methyladenosine
  modified_base 7: mod_base = OTHER; note = 2'-fluoroadenosine
  modified_base 8: mod_base = gm
  modified_base 9: mod_base = OTHER; note = 2'-O-methyladenosine
  modified_base 10: mod_base = um
  modified_base 11: mod_base = OTHER; note = 2'-O-methyladenosine
  modified_base 12: mod_base = um
  modified_base 13: mod_base = um
  modified_base 14: mod_base = OTHER; note = 2'-fluorocytidine
  modified_base 15: mod_base = um
  modified_base 16: mod_base = OTHER; note = 2'-fluorouridine
  modified_base 17: mod_base = um
  modified_base 18: mod_base = gm
  modified_base 19: mod_base = OTHER; note = 2'-O-methyladenosine with a 3' phosphoryl guanidine linkage
  modified_base 20: mod_base = OTHER; note = 2'-O-methyluridine with a 3' phosphoryl guanidine linkage
  modified_base 21: mod_base = OTHER; note = 2'-O-methyluridine with a 3'-phosphorothioate linkage
  modified_base 22: mod_base = OTHER; note = 2'-O-methyluridine with a 3'-phosphorothioate linkage
  modified_base 23: mod_base = um
tcactaagatattctttgatttt